(19) United States
(12) Patent Application Publication
(10) Pub. No.: US 2020/0332314 A1
(43) Pub. Date: Oct. 22, 2020

(54) COMBINATIONS OF INSECTICIDAL POLYPEPTIDES HAVING IMPROVED ACTIVITY SPECTRUM AND USES THEREOF

(71) Applicant: PIONEER HI-BRED INTERNATIONAL, INC., JOHNSTON, IA (US)

(72) Inventors: ALBERT L LU, WEST DES MOINES, IA (US); KNUT MEYER, DES MOINES, IA (US); GILDA RAUSCHER, JOHNSTON, IA (US); GUSUI WU, FOSTER CITY, CA (US)

(73) Assignee: PIONEER HI-BRED INTERNATIONAL, INC., JOHNSTON, IA (US)

(21) Appl. No.: 16/956,182

(22) PCT Filed: Nov. 29, 2018
(86) PCT No.: PCT/US18/62968

§ 371 Date: Jun. 19, 2020

Related U.S. Application Data
(60) Provisional application No. 62/609,879, filed on Dec. 22, 2017.

(51) Int. Cl. C12N 15/82; C07K 14/325; C07K 14/415

(52) U.S. Cl. CPC C12N 15/8286; C07K 14/415; C07K 14/325

(57) ABSTRACT

Compositions and methods for controlling pests are provided. The methods involve transforming organisms with a nucleic acid sequence encoding an insecticidal protein. In particular, the nucleic acid sequences are useful for preparing plants and microorganisms that possess insecticidal activity. Thus, transformed bacteria, plants, plant cells, plant tissues and seeds are provided. Compositions are insecticidal nucleic acids and proteins of bacterial species. The sequences find use in the construction of expression vectors for subsequent transformation into organisms of interest including plants, as probes for the isolation of other homologous (or partially homologous) genes. The pesticidal proteins find use in controlling, inhibiting growth or killing Lepidopteran, Coleopteran, Dipteran, fungal, Hemipteran and nematode pest populations and for producing compositions with insecticidal activity.

### CROSS REFERENCE

[0001] This application claims the benefit of U.S. Provisional Application No. 62/609,879 filed Dec. 22, 2017, which is incorporated herein by reference in its entirety.

### REFERENCE TO SEQUENCE LISTING SUBMITTED ELECTRONICALLY

[0002] The official copy of the sequence listing is submitted electronically via EFS-Web as an ASCII formatted sequence listing with a file named “7497WOPCT_SequenceListing” created on Nov. 5, 2018, and having a size of 1130 kilobytes and is filed concurrently with the specification. The sequence listing contained in this ASCII formatted document is part of the specification and is herein incorporated by reference in its entirety.

### FIELD

[0003] This disclosure relates to the field of molecular biology. Provided are transgenic plants comprising molecular or breeding stacks of genes that encode pesticidal proteins. These stacks of nucleic acid sequences that encode pesticidal proteins are useful in the production of transgenic pest-resistant plants.

### BACKGROUND

[0004] Biological control of insect pests of agricultural significance using a microbial agent, such as fungi, bacteria or another species of insect affords an environmentally friendly and commercially attractive alternative to synthetic chemical pesticides. Generally speaking, the use of biopesticides presents a lower risk of pollution and environmental hazards and biopesticides provide greater target specificity than is characteristic of traditional broad-spectrum chemical insecticides. In addition, biopesticides often cost less to produce and thus improve economic yield for a wide variety of crops.

[0005] Certain species of microorganisms of the genus Bacillus posses pesticidal activity against a range of insect pests including Lepidoptera, Diptera, Coleoptera, Hemiptera and others. Bacillus thuringiensis (B) and Bacillus popilliae are among the most successful biocontrol agents discovered to date. Insect pathogenicity has also been attributed to strains of B. larvae, B. lentimorbus, B. sphaericus and B. cereus. Microbial insecticides, particularly those obtained from Bacillus strains, have played an important role in agriculture as alternatives to chemical pest control.

[0006] Crop plants have been developed with enhanced insect resistance by genetically engineering crop plants to produce pesticidal proteins from Bacillus. For example, corn and cotton plants have been genetically engineered to produce pesticidal proteins isolated from strains of Bacillus thuringiensis. These genetically engineered crops are now widely used in agriculture and have provided the farmer with an environmentally friendly alternative to traditional insect-control methods. While they have proven to be very successful commercially, these genetically engineered, insect-resistant crop plants provide resistance to only a narrow range of the economically important insect pests. In some cases, insects can develop resistance to different insecticidal compounds, which raises the need to identify alternative biological control agents for pest control.

[0007] Accordingly, there remains a need for new pesticidal proteins and combinations of pesticidal proteins with different ranges of insecticidal activity against insect pests, e.g., insecticidal proteins which are active against a variety of insects in the order Lepidoptera and the order Coleoptera including but not limited to insect pests that have developed resistance to existing insecticides.

### SUMMARY

[0008] In one aspect, transgene stacks and methods for conferring pesticidal activity to bacteria, plants, plant cells, tissues and seeds are provided. Transgene stacks include nucleic acid molecules encoding sequences for pesticidal and insecticidal polypeptides, vectors comprising those nucleic acid molecules, and host cells comprising the vectors. Compositions, which comprise transformed bacteria, plants, plant cells, tissues and seeds are also provided. Methods of controlling an insect pest population are also provided.

[0009] In one aspect, transgene stacks comprising an IPD103 polypeptide are encompassed. Provided are transgene stacks that comprise an IPD103 polypeptides of SEQ ID NO: 2, SEQ ID NO: 4, SEQ ID NO: 6, SEQ ID NO: 8, SEQ ID NO: 10, SEQ ID NO: 12, SEQ ID NO: 14, SEQ ID NO: 16, SEQ ID NO: 18, SEQ ID NO: 20, SEQ ID NO: 22, SEQ ID NO: 24, SEQ ID NO: 26, SEQ ID NO: 28, SEQ ID NO: 30, SEQ ID NO: 32, SEQ ID NO: 34, SEQ ID NO: 36, and SEQ ID NO: 38, as well as amino acid substitutions, deletions, insertions, fragments thereof and combinations thereof. Also provided are transgene stacks that comprise an IPD103 polypeptide and at least one other gene encoding another insecticidal polypeptide. Provided are transgene stacks comprising an IPD103 polypeptide and at least one pesticidal polypeptide selected from a Cry1B polypeptide, a variant Cry1B polypeptide, a Cry1C polypeptide, a Cry1D polypeptide, and a Cry1J polypeptide.

[0010] In another aspect methods are provided for producing the transgene stacks and for using those polypeptides for controlling or killing a Lepidopteran, Coleopteran, nematode, fungi, and/or Dipteran pests. The transgenic plants of the embodiments express one or more of the pesticidal sequences disclosed herein. In various embodiments, the transgenic plant further comprises one or more additional genes for insect resistance, for example, one or more additional genes for controlling Coleopteran, Lepidopteran, Hemipteran or nematode pests. The transgenic plant may comprise any gene imparting an agronomic trait of interest.

[0011] In another aspect, methods for detecting the nucleic acids and polypeptides of the embodiments in a sample are also included. A kit for detecting the presence of the transgene stack in a sample is provided. The kit may be provided along with all reagents and control samples necessary for carrying out a method for detecting the intended agent, as well as instructions for use.

[0012] In another aspect, the compositions and methods of the embodiments are useful to produce organisms with enhanced pest resistance or tolerance. These organisms and compositions comprising the organisms are desirable for agricultural purposes.

### BRIEF DESCRIPTION OF THE FIGURES

[0013] FIG. 1A-1B shows an amino acid sequence alignment, using the ALIGNX® module of the Vector NTI® suite, of the IPD103Aa polypeptide (SEQ ID NO: 2), IPD103Ab polypeptide (SEQ ID NO: 4), IPD103Ac polypeptide (SEQ ID NO: 6), IPD103Ad polypeptide (SEQ ID NO: 8), IPD103Ae polypeptide (SEQ ID NO: 10), IPD103Ba polypeptide (SEQ ID NO: 12), IPD103Bb polypeptide (SEQ ID NO: 14), IPD103Be polypeptide (SEQ ID NO: 16), IPD103Bd polypeptide (SEQ ID NO: 18), IPD103Be polypeptide (SEQ ID NO: 20), IPD103Bf polypeptide (SEQ ID NO: 22), IPD103Bg polypeptide (SEQ ID NO: 24), IPD103Bh polypeptide (SEQ ID NO: 26), IPD103Ca polypeptide (SEQ ID NO: 34), and IPD103 Da polypeptide (SEQ ID NO: 38). The amino acid sequence diversity between the amino acid sequences is highlighted. Conservative amino acid differences are indicated by (A) shading and non-conservative amino acid difference by (A) shading.

[0014] FIG. 2 shows the % leaf damage by CEW, ECB and FAW of individual transgenic TO maize events from constructs PHP79658, PHP79559 and PHP79660 expressing the IPD103Aa polypeptide (SEQ ID NO: 2).

[0015] FIG. 3 shows the Total Corn Ear Feeding (cm²) by CEW of individual transgenic TO maize events from constructs PHP79658, PHP79559 and PHP79660 expressing the IPD103Aa polypeptide (SEQ ID NO: 2).

[0016] FIG. 4 shows a curve reflecting densitometry values of in-gel fluorescence, from the SDS-PAGE gel of Example 16, for homologous competition of 25 nM IPD103Aa^{Alexa} binding to Helicoverpa zea (Corn Earworm) BBMVs normalized to the amount bound in the absence of unlabeled IPD103Aa (SEQ ID NO: 2). The solid line reflects the best fit of a square logistic equation to the data.

[0017] FIG. 5 shows a curve reflecting densitometry values of in-gel fluorescence, from the SDS-PAGE gel of Example 16, for homologous competition of 25 nM IPD103Aa^{Alexa} binding to Ostrinia nubilais (European Corn Borer) BBMVs normalized to the amount bound in the absence of unlabeled IPD103Aa (SEQ ID NO: 2). The solid line reflects the best fit of a square logistic equation to the data.

### DETAILED DESCRIPTION

[0018] It is to be understood that this disclosure is not limited to the particular methodology, protocols, cell lines, genera, and reagents described, as such may vary. It is also to be understood that the terminology used herein is for the purpose of describing particular embodiments only, and is not intended to limit the scope of the present disclosure.

[0019] As used herein the singular forms “a”, “and”, and “the” include plural referents unless the context clearly dictates otherwise. Thus, for example, reference to “a cell” includes a plurality of such cells and reference to “the protein” includes reference to one or more proteins and equivalents. All technical and scientific terms used herein have the same meaning as commonly understood to one of ordinary skill in the art to which this disclosure belongs unless clearly indicated otherwise.

[0020] The present disclosure is drawn to molecular stacks and breeding stacks and methods for controlling pests. As used herein, a “molecular stack” is defined as multiple trait genes delivered in one or more pieces of recombinant DNA simultaneously or consecutively into a single transgenic locus. As used herein, a “breeding stack” is defined as multiple trait genes that are delivered by conventional breeding, by the crossing of a transgenic plant containing individual transgene(s) in a first transgenic locus, with another transgenic plant containing other single or multiple transgenes in a second transgenic locus. The methods involve transforming organisms with a molecular nucleic acid sequences encoding an IPD103 polypeptide and at least one other pesticidal polypeptide. Thus, transformed bacteria, plants, plant cells, plant tissues and seeds are provided. The compositions include pesticidal nucleic acids and proteins of bacterial species. The transgene stacks find use in controlling or killing Lepidopteran, Coleopteran, Dipteran, fungal, Hemipteran and/or nematode pest populations and for producing transgenic plants with pesticidal activity. Insect pests of interest include, but are not limited to, Lepidoptera species including but not limited to: Corn Earworm, (CEW) (Helicoverpa zea), European Corn Borer (ECB) (Ostrinia nubialis), diamond-back moth, e.g., Helicoverpa zea Boddie; soybean looper, e.g., Pseudopusia includens Walker and velvet bean caterpillar e.g., Anticarsia gemmatalis Hübner and Coleoptera species including but not limited to Western corn rootworm (Diabrotica virgifera)—WCRW, Southern corn rootworm (Diabrotica undecimpunctata howardi)—SCRW, and Northern corn rootworm (Diabrotica barberi)—NCRW.

[0021] By “pesticidal toxin” or “pesticidal protein” is used herein to refer to a toxin that has toxic activity against one or more pests, including, but not limited to, members of the Lepidoptera, Diptera, Hemiptera and Coleoptera orders or the Nematoda phylum or a protein that has homology to such a protein. Pesticidal proteins have been isolated from organisms including, for example, Bacillus sp., Pseudomonas sp., Photorhabdus sp., Xenorhabdus sp., Clostridium bifermentans and Paenibacillus popilliae. Pesticidal proteins include but are not limited to: insecticidal proteins from Pseudomonas sp. such as PSEEN3174 (Monalysin; (2011) PLoS Pathogens 7:1-13); from Pseudomonas protegens strain CHAO and PF-5 (previously fluorescens) (Pechy-Tarr, (2008) Environmental Microbiology 10:2368-2386; GenBank Accession No. EU400157); from Pseudomonas taiwanensis (Liu, et al., (2010) J. Agric. Food Chem., 58:12343-12349) and from Pseudomonas pseudoacaligenes (Zhang, et al., (2009) Annals of Microbiology 59:45-50 and Li, et al., (2007) Plant Cell Tiss. Organ Cult. 89:159-168); insecticidal proteins from Photorhabdus sp. and Xenorhabdus sp. (Hinchliffe, et al., (2010) The Open Toxicology Journal, 3:101-118 and Morgan, et al., (2001) Applied and Envir. Micro. 67:2062-2069); U.S. Pat. Nos. 6,048,838, and 6,379,946; a PIP-1 polypeptide of US Patent Publication US20140007292; an AflP-1A and/or AflP-1B polypeptide of US Patent Publication US20140033361; a PHI-4 polypeptide of US Patent Publication US20140274885 and US20160040184; a PIP-47 polypeptide of PCT Publication Number WO2015/023846, a PIP-72 polypeptide of PCT Publication Number WO2015/038734; a PtlP-50 polypeptide and a PtlP-65 polypeptide of PCT Publication Number WO2015/120270; a PtlP-83 polypeptide of PCT Publication Number WO2015/120276; a PtlP-96 polypeptide of US Publication No. 2017-0233440; an IPD079 polypeptide of US Publication No. 2018-0222947; an IPD082 polypeptide of PCT WO 2017/105987, and 6-endotoxins including, but not limited to, the Cry1, Cry2, Cry3, Cry4, Cry5, Cry6, Cry7, Cry8, Cry9, Cry10, Cry11, Cry12, Cry13, Cry14, Cry15, Cry16, Cry17, Cry18, Cry19, Cry20, Cry21, Cry22, Cry23, Cry24, Cry25, Cry26, Cry27, Cry28, Cry29, Cry30, Cry31, Cry32, Cry33, Cry34, Cry35, Cry36, Cry37, Cry38, Cry39, Cry40, Cry41, Cry42, Cry43, Cry44, Cry45, Cry46, Cry47, Cry49, Cry50, Cry51, Cry52, Cry53, Cry54, Cry55, Cry56, Cry57, Cry58, Cry59, Cry60, Cry61, Cry62, Cry63, Cry64, Cry65, Cry66, Cry67, Cry68, Cry69, Cry70, Cry71, and Cry 72 classes of δ-endotoxin genes and the B. thuringiensis cytolytic cyt1 and cyt2 genes. Members of these classes of B. thuringiensis insecticidal proteins (see, Crickmore, et al., “Bacillus thuringiensis toxin nomenclature” (2011), at lifesci.sussex.ac.uk/home/Neil_Crckmore/Bt/ which can be accessed on the world-wide web using the “www” prefix).

[0022] Examples of 6-endotoxins also include but are not limited to Cry1A proteins of U.S. Pat. Nos. 5,880,275 and 7,858,849; a DIG-3 or DIG-11 toxin (N-terminal deletion of α-helix 1 and/or α-helix 2 variants of cry proteins such as Cry1A, Cry3A) of U.S. Pat. Nos. 8,304,604, 8,304,605 and 8,476,226; Cry1B of PCT WO 2004/020636; Cry1C of U.S. Pat. No. 6,033,874; Cry1F of U.S. Pat. Nos. 5,188,960 and 6,218,188; Cry1A/F chimeras of U.S. Pat. Nos. 7,070,982; 6,962,705 and 6,713,063); a Cry2 protein such as Cry2Ab protein of U.S. Pat. No. 7,064,249); a Cry3A protein including but not limited to an engineered hybrid insecticidal protein (eHIP) created by fusing unique combinations of variable regions and conserved blocks of at least two different Cry proteins (US Patent Application Publication Number 2010/0017914); a Cry4 protein; a Cry5 protein; a Cry6 protein; Cry8 proteins of U.S. Pat. Nos. 7,329,736, 7,449,552, 7,803,943, 7,476,781, 7,105,332, 7,378,499 and 7,462,760; a Cry9 protein such as such as members of the Cry9A, Cry9B, Cry9C, Cry9D, Cry9E and Cry9F families; a Cry15 protein of Naimov, et al., (2008) Applied and Environmental Microbiology, 74:7145-7151; a Cry22, a Cry34Ab1 protein of U.S. Pat. Nos. 6,127,180, 6,624,145 and 6,340,593; a CryET33 and cryET34 protein of U.S. Pat. Nos. 6,248,535, 6,326,351, 6,399,330, 6,949,626, 7,385,107 and 7,504,229; a CryET33 and CryET34 homologs of US Patent Publication Number 2006/0191034, 2012/0278954, and PCT Publication Number WO 2012/139004; a Cry35Ab1 protein of U.S. Pat. Nos. 6,083,499, 6,548,291 and 6,340,593; a Cry46 protein, a Cry 51 protein, a Cry binary toxin; a TIC901 or related toxin; TIC807 of US Patent Application Publication Number 2008/0295207; ET29, ET37, TIC809, TIC810, TIC812, TIC127, TIC128 of PCT US 2006/033867; AXMI-027, AXMI-036, and AXMI-038 of U.S. Pat. No. 8,236,757; AXMI-031, AXMI-039, AXMI-040, AXMI-049 of U.S. Pat. No. 7,923,602; AXMI-018, AXMI-020 and AXMI-021 of WO 2006/083891; AXMI-010 of WO 2005/038032; AXMI-003 of WO 2005/021585; AXMI-008 of US Patent Application Publication Number 2004/0250311; AXMI-006 of US Patent Application Publication Number 2004/0216186; AXMI-007 of US Patent Application Publication Number 2004/0210965; AXMI-009 of US Patent Application Number 2004/0210964; AXMI-014 of US Patent Application Publication Number 2004/0197917; AXMI-004 of US Patent Application Publication Number 2004/0197916; AXMI-028 and AXMI-029 of WO 2006/119457; AXMI-007, AXMI-008, AXMI-0080rf2, AXMI-009, AXMI-014 and AXMI-004 of WO 2004/074462; AXMI-150 of U.S. Pat. No. 8,084,416; AXMI-205 of US Patent Application Publication Number 2011/0023184; AXMI-011, AXMI-012, AXMI-013, AXMI-015, AXMI-019, AXMI-044, AXMI-037, AXMI-043, AXMI-033, AXMI-034, AXMI-022, AXMI-023, AXMI-041, AXMI-063 and AXMI-064 of US Patent Application Publication Number 2011/0263488; AXMI-R1 and related proteins of US Patent Application Publication Number 2010/0197592; AXMI221Z, AXMI222z, AXMI223z, AXMI224z and AXMI225z of WO 2011/103248; AXMI218, AXMI219, AXMI220, AXMI226, AXMI227, AXMI228, AXMI229, AXMI230 and AXMI231 of WO 2011/103247; AXMI-115, AXMI-113, AXMI-005, AXMI-163 and AXMI-184 of U.S. Pat. No. 8,334,431; AXMI-001, AXMI-002, AXMI-030, AXMI-035 and AXMI-045 of US Patent Application Publication Number 2010/0298211; AXMI-066 and AXMI-076 of US Patent Application Publication Number 2009/0144852; AXMI128, AXMI130, AXMI131, AXMI133, AXMI140, AXMI141, AXMI142, AXMI143, AXMI144, AXMI146, AXMI148, AXMI149, AXMI152, AXMI153, AXMI154, AXMI155, AXMI156, AXMI157, AXMI158, AXMI162, AXMI165, AXMI166, AXMI167, AXMI168, AXMI169, AXMI170, AXMI171, AXMI172, AXMI173, AXMI174, AXMI175, AXMI176, AXMI177, AXMI178, AXMI179, AXMI180, AXMI181, AXMI182, AXMI185, AXMI186, AXMI187, AXMI188, AXMI189 of U.S. Pat. No. 8,318,900; AXMI079, AXMI080, AXMI081, AXMI082, AXMI091, AXMI092, AXMI096, AXMI097, AXMI098, AXMI099, AXMI100, AXMI101, AXMI102, AXMI103, AXMI104, AXMI107, AXMI108, AXMI109, AXMI110, AXMI111, AXMI112, AXMI114, AXMI116, AXMI117, AXMI118, AXMI119, AXMI120, AXMI121, AXMI122, AXMI123, AXMI124, AXMI257, AXMI1268, AXMI127, AXMI129, AXMI164, AXMI151, AXMI161, AXMI183, AXMI132, AXMI138, AXMI137 of US Patent Application Publication Number 2010/0005543, cry proteins such as Cry1A and Cry3A having modified proteolytic sites of U.S. Pat. No. 8,319,019; a Cry1Ac, Cry2Aa and Cry1Ca toxin protein from Bacillus thuringiensis strain VBTS 2528 of US Patent Application Publication Number 2011/0064710. The insecticidal activity of Cry proteins is known to one skilled in the art (for review, see, van Frannkenhuyzen, (2009) J. Invert. Path. 101:1-16). The use of Cry proteins as transgenic plant traits and Cry-transgenic plants including but not limited to plants expressing Cry1Ac, Cry1Ac+Cry2Ab, Cry1Ab, Cry1A.105, Cry1F, Cry1Fa2, Cry1F+Cry1Ac, Cry2Ab, Cry3A, mCry3A, Cry3Bb1, Cry34Ab1, Cry35Ab1, Vip3A, mCry3A, Cry9c and CBI-Bt have received regulatory approval (see, Sanahuja, (2011) Plant Biotech Journal 9:283-300 and the CERA. (2010) GM Crop Database Center for Environmental Risk Assessment (CERA), ILSI Research Foundation, Washington D.C. at cera-gmc.org/ndex.php?action=gm_crop_database which can be accessed on the world-wide web using the “www” prefix). More than one pesticidal proteins can also be expressed in plants such as Vip3Ab & Cry1Fa (US2012/0317682); Cry1BE & Cry1F (US2012/0311746); Cry1CA & Cry1AB (US2012/0311745); Cry1F & CryCa (US2012/0317681); Cry1 Da & Cry1Be (US2012/0331590); Cry1 Da & Cry1Fa (US2012/0331589); Cry1AB & Cry1BE (US2012/0324606); Cry1Fa & Cry2Aa and Cry11 & Cry1E (US2012/0324605); Cry34Ab/35Ab and Cry6Aa (US20130167269); Cry34Ab/VCry35Ab & Cry3Aa (US20130167268); and Cry3A and Cry1Ab or Vip3Aa (US20130116170). Pesticidal proteins also include insecticidal lipases including lipid acyl hydrolases of U.S. Pat. No. 7,491,869, and cholesterol oxidases such as from Streptomyces (Purcell et al. (1993) Biochem Biophys Res Commun 15:1406-1413). Pesticidal proteins also include VIP (vegetative insecticidal proteins) toxins of U.S. Pat. Nos. 5,877,012, 6,107,279 6,137,033, 7,244,820, 7,615,686, and 8,237,020 and the like (see, lifesci.sussex.ac.uk/home/Neil_Crickmore/Bt/vip.html which can be accessed on the world-wide web using the “www” prefix). Pesticidal proteins also include toxin complex (TC) proteins, obtainable from organisms such as Xenorhabdus, Photorhabdus and Paenibacillus (see, U.S. Pat. Nos. 7,491,698 and 8,084,418). Some TC proteins have “stand alone” insecticidal activity and other TC proteins enhance the activity of the stand-alone toxins produced by the same given organism. The toxicity of a “stand-alone” TC protein (from Photorhabdus, Xenorhabdus or Paenibacillus, for example) can be enhanced by one or more TC protein “potentiators” derived from a source organism of a different genus. There are three main types of TC proteins. As referred to herein, Class A proteins (“Protein A”) are stand-alone toxins. Class B proteins (“Protein B”) and Class C proteins (“Protein C”) enhance the toxicity of Class A proteins. Examples of Class A proteins are TcbA, TcdA, XptA1 and XptA2. Examples of Class B proteins are TcaC, TcdB, XptB1Xb and XptC1Wi. Examples of Class C proteins are TccC, XptC1Xb and XptB1Wi. Pesticidal proteins also include spider, snake and scorpion venom proteins. Examples of spider venom peptides include but not limited to lycotoxin-1 peptides and mutants thereof (U.S. Pat. No. 8,334,366).

[0023] In some embodiments, an “IPD103 polypeptide” or “IPD103 protein” is defined as a polypeptide having insecticidal activity, as disclosed in PCT WO 2018/005411, which is herein incorporated by reference.

[0024] In some embodiments, the IPD103 polypeptide has at least about 40%, 45%, 50%, 51%, 52%, 53%, 54%, 55%, 56%, 57%, 58%, 59%, 60%, 61%, 62%, 63%, 64%, 65%, 66%, 67%, 68%, 69%, 70%, 71%, 72%, 73%, 74%, 75%, 76%, 77%, 78%, 79%, 80%, 81%, 82%, 83%, 84%, 85%, 86%, 87%, 88%, 89%, 90%, 91%, 92%, 93%, 94%, 95%, 96%, 97%, 98%, 99% or greater sequence identity compared to SEQ ID NO: 2, SEQ ID NO: 4, SEQ ID NO: 6, SEQ ID NO: 8, SEQ ID NO: 10, SEQ ID NO: 12, SEQ ID NO: 14, SEQ ID NO: 16, SEQ ID NO: 18, SEQ ID NO: 20, SEQ ID NO: 22, SEQ ID NO: 24, SEQ ID NO: 26, SEQ ID NO: 28, SEQ ID NO: 30, SEQ ID NO: 32, SEQ ID NO: 34, SEQ ID NO: 36 or SEQ ID NO: 38. The term “about” when used herein in context with percent sequence identity means+/−0.5%.

[0025] In some embodiments, the IPD103 polypeptide has at least 95% identity to the amino acid sequence of SEQ ID NO: 2, SEQ ID NO: 4, SEQ ID NO: 6, SEQ ID NO: 8, SEQ ID NO: 10, SEQ ID NO: 12, SEQ ID NO: 14, SEQ ID NO: 16, SEQ ID NO: 18, SEQ ID NO: 20, SEQ ID NO: 22, SEQ ID NO: 24, SEQ ID NO: 26, SEQ ID NO: 28, SEQ ID NO: 30, SEQ ID NO: 32, SEQ ID NO: 34, SEQ ID NO: 36 or SEQ ID NO: 38.

[0026] In some embodiments, the IPD103 polypeptide comprises the amino acid sequence of SEQ ID NO: 2, SEQ ID NO: 4, SEQ ID NO: 6, SEQ ID NO: 8, SEQ ID NO: 10, SEQ ID NO: 12, SEQ ID NO: 14, SEQ ID NO: 16, SEQ ID NO: 18, SEQ ID NO: 20, SEQ ID NO: 22, SEQ ID NO: 24, SEQ ID NO: 26, SEQ ID NO: 28, SEQ ID NO: 30, SEQ ID NO: 32, SEQ ID NO: 34, SEQ ID NO: 36 or SEQ ID NO: 38.

[0027] In some embodiments, the IPD103 polypeptide has at least 95% identity to the amino acid sequence of SEQ ID NO: 252, SEQ ID NO: 253, SEQ ID NO: 254, SEQ ID NO: 255, SEQ ID NO: 256, SEQ ID NO: 257, SEQ ID NO: 258, SEQ ID NO: 259, SEQ ID NO:260 or SEQ ID NO: 261.

[0028] In some embodiments, the IPD103 polypeptide comprises the amino acid sequence of SEQ ID NO: 252, SEQ ID NO: 253, SEQ ID NO: 254, SEQ ID NO: 255, SEQ ID NO: 256, SEQ ID NO: 257, SEQ ID NO: 258, SEQ ID NO: 259, SEQ ID NO:260 or SEQ ID NO: 261.

[0029] In some embodiments, a “PtlP-83 polypeptide” or “PtlP-83 protein” is defined as a polypeptide having insecticidal activity, as disclosed in US Publication US 21060347799, which is herein incorporated by reference.

[0030] In some embodiments, the PtlP-83 polypeptide has at least about 40%, 45%, 50%, 51%, 52%, 53%, 54%, 55%, 56%, 57%, 58%, 59%, 60%, 61%, 62%, 63%, 64%, 65%, 66%, 67%, 68%, 69%, 70%, 71%, 72%, 73%, 74%, 75%, 76%, 77%, 78%, 79%, 80%, 81%, 82%, 83%, 84%, 85%, 86%, 87%, 88%, 89%, 90%, 91%, 92%, 93%, 94%, 95%, 96%, 97%, 98%, 99% or greater sequence identity compared to SEQ ID NO: 39, SEQ ID NO: 41, SEQ ID NO: 43, SEQ ID NO: 45, SEQ ID NO: 47, SEQ ID NO: 49, SEQ ID NO: 51, SEQ ID NO: 53, SEQ ID NO: 55, SEQ ID NO: 57, SEQ ID NO: 59, and SEQ ID NO: 61.

[0031] In some embodiments, the PtlP-83 polypeptide comprises an amino acid sequence having at least 95% sequence identity to an amino acid sequence of SEQ ID NO: 39, SEQ ID NO: 41, SEQ ID NO: 43, SEQ ID NO: 45, SEQ ID NO: 47, SEQ ID NO: 49, SEQ ID NO: 51, SEQ ID NO: 53, SEQ ID NO: 55, SEQ ID NO: 57, SEQ ID NO: 59, and SEQ ID NO: 61.

[0032] In some embodiments, the PtlP-83 polypeptide comprises an amino acid sequence of SEQ ID NO: 39, SEQ ID NO: 41, SEQ ID NO: 43, SEQ ID NO: 45, SEQ ID NO: 47, SEQ ID NO: 49, SEQ ID NO: 51, SEQ ID NO: 53, SEQ ID NO: 55, SEQ ID NO: 57, SEQ ID NO: 59, and SEQ ID NO: 61.

[0033] In some embodiments, the Cry1B polypeptide is selected from Cry1Ba1 (Accession CAA29898, Cry1Ba2 (Accession CAA65003), Cry1Ba3 (Accession AAK63251), Cry1Ba4 (Accession AAK51084, Cry1Ba5 (Accession AB020894), Cry1Ba6 (Accession ABL60921), Cry1Ba7 (Accession HQ439781), Cry1Bb1 (AAA22344), Cry1Bb2 (Accession HQ439782), Cry1Bc1 (Accession CAA86568), Cry1Bd1 (Accession AAD10292), Cry1Bd2 (Accession AAM93496), Cry1Be1 (Accession AAC32850), Cry1Be2 (Accession AAQ52387), Cry1Be3 (Accession ACV96720), Cry1Be4 (Accession HM070026), Cry1Bf1 (Accession CAC50778), Cry1Bf2 (Accession AAQ52380), Cry1Bg1 (Accession AA039720), Cry1Bh1 (Accession HQ589331), and Cry1Bi1 (Accession KC156700).

[0034] In some embodiments, the Cry1B polypeptide is selected from a Cry1B of U.S. Pat. Nos. 8,772,577, 9,404,121, US Publication US 20160194364, and U.S. Ser. No. 62/607,372, which are incorporated herein.

[0035] In some embodiments, the Cry1B polypeptide is selected from the amino acid sequence of SEQ ID NO: 63, SEQ ID NO: 109, SEQ ID NO: 111, SEQ ID NO: 221, SEQ ID NO: 223, SEQ ID NO: 224, SEQ ID NO: 225, SEQ ID NO: 226, SEQ ID NO: 227, SEQ ID NO: 228, and SEQ ID NO: 229.

[0036] In some embodiments, the Cry1B polypeptide is a variant Cry1B polypeptide of US Publication US 20170226164 and WO Publication WO2017/180715, which are incorporated herein.

[0037] In some embodiments, the variant Cry1B polypeptide comprises the amino acid sequence of SEQ ID NO: 65, SEQ ID NO: 67, SEQ ID NO: 69, SEQ ID NO: 71, SEQ ID NO: 73, SEQ ID NO: 75, SEQ ID NO: 77, SEQ ID NO: 79, SEQ ID NO: 81, SEQ ID NO: 83, SEQ ID NO: 84, SEQ ID NO: 85, SEQ ID NO: 87, SEQ ID NO: 89, SEQ ID NO: 91, SEQ ID NO: 93, SEQ ID NO: 95, SEQ ID NO: 97, SEQ ID NO: 99, SEQ ID NO: 101, SEQ ID NO: 103, SEQ ID NO: 105, SEQ ID NO: 107, SEQ ID NO: 113, SEQ ID NO: 114, SEQ ID NO: 115, SEQ ID NO: 116, SEQ ID NO: 117, SEQ ID NO: 118, SEQ ID NO: 119, SEQ ID NO: 120, SEQ ID NO: 121, SEQ ID NO: 122, SEQ ID NO: 123, SEQ ID NO: 124, SEQ ID NO: 125, SEQ ID NO: 126, SEQ ID NO: 127, SEQ ID NO: 128, SEQ ID NO: 129, SEQ ID NO: 130, SEQ ID NO: 131, SEQ ID NO: 132, SEQ ID NO: 133, SEQ ID NO: 134, SEQ ID NO: 135, SEQ ID NO: 136, SEQ ID NO: 137, SEQ ID NO: 138, SEQ ID NO: 139, SEQ ID NO: 140, SEQ ID NO: 141, SEQ ID NO: 142, SEQ ID NO: 143, SEQ ID NO: 144, SEQ ID NO: 145, SEQ ID NO: 146, SEQ ID NO: 147, SEQ ID NO: 148, SEQ ID NO: 149, SEQ ID NO: 150, SEQ ID NO: 151, SEQ ID NO: 152, SEQ ID NO: 153, SEQ ID NO: 154, SEQ ID NO: 155, SEQ ID NO: 156, SEQ ID NO: 157, SEQ ID NO: 158, SEQ ID NO: 159, SEQ ID NO: 160, SEQ ID NO: 161, SEQ ID NO: 162, SEQ ID NO: 163, SEQ ID NO: 164, SEQ ID NO: 165, SEQ ID NO: 166, SEQ ID NO: 167, SEQ ID NO: 168, SEQ ID NO: 169, SEQ ID NO: 170, SEQ ID NO: 171, SEQ ID NO: 172, SEQ ID NO: 173, SEQ ID NO: 174, SEQ ID NO: 175, SEQ ID NO: 176, SEQ ID NO: 177, SEQ ID NO: 178, SEQ ID NO: 179, SEQ ID NO: 180, SEQ ID NO: 181, SEQ ID NO: 182, SEQ ID NO: 183, SEQ ID NO: 184, SEQ ID NO: 185, SEQ ID NO: 186, SEQ ID NO: 187, SEQ ID NO: 188, SEQ ID NO: 189, SEQ ID NO: 190, SEQ ID NO: 191, SEQ ID NO: 191, SEQ ID NO: 192, SEQ ID NO: 193, SEQ ID NO: 194, SEQ ID NO: 195, SEQ ID NO: 196, SEQ ID NO: 197, SEQ ID NO: 198, SEQ ID NO: 199, SEQ ID NO: 200, SEQ ID NO: 201, SEQ ID NO: 202, SEQ ID NO: 203, SEQ ID NO: 204, SEQ ID NO: 205, SEQ ID NO: 206, SEQ ID NO: 207, SEQ ID NO: 208, SEQ ID NO: 209, SEQ ID NO: 210 or SEQ ID NO: 211.

[0038] In some embodiments, the variant Cry1B polypeptide is selected from SEQ ID NO: 65, SEQ ID NO: 67, SEQ ID NO: 69, SEQ ID NO: 71, SEQ ID NO: 73, SEQ ID NO: 75, SEQ ID NO: 77, SEQ ID NO: 79, SEQ ID NO: 81, SEQ ID NO: 83, SEQ ID NO: 84, SEQ ID NO: 85, SEQ ID NO: 87, SEQ ID NO: 89, SEQ ID NO: 91, SEQ ID NO: 93, SEQ ID NO: 95, SEQ ID NO: 97, SEQ ID NO: 99, SEQ ID NO: 101, SEQ ID NO: 103, SEQ ID NO: 105, SEQ ID NO: 107, SEQ ID NO: 113, SEQ ID NO: 114, SEQ ID NO: 115, SEQ ID NO: 116, SEQ ID NO: 117, SEQ ID NO: 118, SEQ ID NO: 119, SEQ ID NO: 120, SEQ ID NO: 121, SEQ ID NO: 122, SEQ ID NO: 123, SEQ ID NO: 124, SEQ ID NO: 125, SEQ ID NO: 126, SEQ ID NO: 127, SEQ ID NO: 128, SEQ ID NO: 129, SEQ ID NO: 130, SEQ ID NO: 131, SEQ ID NO: 132, SEQ ID NO: 133, SEQ ID NO: 134, SEQ ID NO: 135, SEQ ID NO: 136, SEQ ID NO: 137, SEQ ID NO: 138, SEQ ID NO: 139, SEQ ID NO: 140, SEQ ID NO: 141, SEQ ID NO: 142, SEQ ID NO: 143, SEQ ID NO: 144, SEQ ID NO: 145, SEQ ID NO: 146, SEQ ID NO: 147, SEQ ID NO: 148, SEQ ID NO: 149, SEQ ID NO: 150, SEQ ID NO: 151, SEQ ID NO: 152, SEQ ID NO: 153, SEQ ID NO: 154, SEQ ID NO: 155, SEQ ID NO: 156, SEQ ID NO: 157, SEQ ID NO: 158, SEQ ID NO: 159, SEQ ID NO: 160, SEQ ID NO: 161, SEQ ID NO: 162, SEQ ID NO: 163, SEQ ID NO: 164, SEQ ID NO: 165, SEQ ID NO: 166, SEQ ID NO: 167, SEQ ID NO: 168, SEQ ID NO: 169, SEQ ID NO: 170, SEQ ID NO: 171, SEQ ID NO: 172, SEQ ID NO: 173, SEQ ID NO: 174, SEQ ID NO: 175, SEQ ID NO: 176, SEQ ID NO: 177, SEQ ID NO: 178, SEQ ID NO: 179, SEQ ID NO: 180, SEQ ID NO: 181, SEQ ID NO: 182, SEQ ID NO: 183, SEQ ID NO: 184, SEQ ID NO: 185, SEQ ID NO: 186, SEQ ID NO: 187, SEQ ID NO: 188, SEQ ID NO: 189, SEQ ID NO: 190, SEQ ID NO: 191, SEQ ID NO: 191, SEQ ID NO: 192, SEQ ID NO: 193, SEQ ID NO: 194, SEQ ID NO: 195, SEQ ID NO: 196, SEQ ID NO: 197, SEQ ID NO: 198, SEQ ID NO: 199, SEQ ID NO: 200, SEQ ID NO: 201, SEQ ID NO: 202, SEQ ID NO: 203, SEQ ID NO: 204, SEQ ID NO: 205, SEQ ID NO: 206, SEQ ID NO: 207, SEQ ID NO: 208, SEQ ID NO: 209, SEQ ID NO: 210, and SEQ ID NO: 211.

[0039] In some embodiments, the Cry1C polypeptide is selected from Cry1Ca1 (Accession CAA30396), Cry1Ca2 (Accession CAA31951), Cry1Ca3 (Accession AAA22343), Cry1Ca4 (Accession CAA01886), Cry1Ca5 (Accession CAA65457), Cry1Ca6 (Accession AAF37224), Cry1Ca7 (Accession AAG50438), Cry1Ca8 (Accession AAM00264), Cry1Ca9 (Accession AAL79362), Cry1Ca10 (Accession AAN16462), Cry1Ca11 (Accession AAX53094), Cry1Ca12 (Accession HM070027), Cry1Ca13 (Accession HQ412621), Cry1Ca14 (Accession JN651493), Cry1Cb1 (Accession M97880), Cry1Cb2 (Accession AAG35409), Cry1Cb3 (Accession ACD50894), Cry1Cb-like (Accession AAX63901), Cry1Da1 (Accession CAA38099), Cry1Da2 (Accession 176415), and Cry1Da3 (Accession HQ43978).

[0040] In some embodiments, the Cry1C polypeptide comprises an amino acid sequence having at least 95% sequence identity to the Cry1Ca polypeptide of SEQ ID NO: 230.

[0041] In some embodiments, the Cry1C polypeptide comprises the amino acid sequence of SEQ ID NO: 230.

[0042] In some embodiments, the Cry1D polypeptide is selected from Cry1Da1 (Accession CAA38099), Cry1Da2 (Accession 176415), Cry1Da3 (Accession HQ439784), Cry1Db1 (Accession CAA80234), Cry1Db2 (Accession AAK48937), Cry1Dc1 (Accession ABK35074), and a Cry1D polypeptide of US 2017 0233759, which is herein incorporated by reference in its entirety.

[0043] In some embodiments, the Cry1D polypeptide comprises an amino acid sequence having at least 95% sequence identity to the Cry1 Da polypeptide of US 2017 0233759.

[0044] In some embodiments, the Cry1D polypeptide comprises an amino acid sequence having at least 95% sequence identity to the Cry1 Da polypeptide of SEQ ID NO: 231, SEQ ID NO: 233, SEQ ID NO: 235, SEQ ID NO: 237, SEQ ID NO: 239 or SEQ ID NO: 241.

[0045] In some embodiments, the Cry1D polypeptide comprises the amino acid sequence of SEQ ID NO: 231, SEQ ID NO: 233, SEQ ID NO: 235, SEQ ID NO: 237, SEQ ID NO: 239 or SEQ ID NO: 241.

[0046] In some embodiments, the Cry1J polypeptide is selected from Cry1Ja1 (Accession AAA22341), Cry1Ja2 (Accession HM070030), Cry1Ja3 (Accession JQ228425), Cry1Jb1 (Accession AAA98959), Cry1Jc1 (Accession AAC31092), Cry1Jc2 (Accession AAQ52372), Cry1Jd1 (Accession CAC50779).

[0047] In some embodiments, the Cry1J polypeptide is selected from a variant Cry1J of US Publication Number US20170240603.

[0048] In some embodiments, the Cry1J variant polypeptide comprises an amino acid sequence having at least 95% identity to SEQ ID NO: 213, SEQ ID NO: 215, SEQ ID NO: 217 or SEQ ID NO: 219.

[0049] In some embodiments, the Cry1J variant polypeptide comprises the amino acid sequence of SEQ ID NO: 213, SEQ ID NO: 215, SEQ ID NO: 217 or SEQ ID NO: 219.

[0050] In some embodiments, the variant Cry1J polypeptide is selected from SEQ ID NO: 213, SEQ ID NO: 215, SEQ ID NO: 217 or SEQ ID NO: 219.

### Nucleic Acid Molecules, and Variants and Fragments Thereof

[0051] Isolated or recombinant nucleic acid molecules comprising nucleic acid sequences encoding IPD103 polypeptides, PtlP-83 polypeptides, Cry1B polypeptides, variant Cry1B polypeptides, Cry1C polypeptides, Cry1D polypeptide, and Cry1J polypeptides As used herein, the term “nucleic acid molecule” refers to DNA molecules (e.g., recombinant DNA, cDNA, genomic DNA, plastid DNA, mitochondrial DNA) and RNA molecules (e.g., mRNA) and analogs of the DNA or RNA generated using nucleotide analogs. The nucleic acid molecule can be single-stranded or double-stranded, but preferably is double-stranded DNA.

[0052] An “isolated” nucleic acid molecule (or DNA) is used herein to refer to a nucleic acid sequence (or DNA) that is no longer in its natural environment, for example in vitro. A “recombinant” nucleic acid molecule (or DNA) is used herein to refer to a nucleic acid sequence (or DNA) that is in a recombinant bacterial or plant host cell. In some embodiments, an “isolated” or “recombinant” nucleic acid is free of sequences (preferably protein encoding sequences) that naturally flank the nucleic acid (i.e., sequences located at the 5′ and 3′ ends of the nucleic acid) in the genomic DNA of the organism from which the nucleic acid is derived. For purposes of the disclosure, “isolated” or “recombinant” when used to refer to nucleic acid molecules excludes isolated chromosomes.

[0053] In some embodiments, an isolated nucleic acid molecule encoding polypeptides of the disclosure has one or more change in the nucleic acid sequence compared to the native or genomic nucleic acid sequence. In some embodiments the change in the native or genomic nucleic acid sequence includes but is not limited to: changes in the nucleic acid sequence due to the degeneracy of the genetic code; changes in the nucleic acid sequence due to the amino acid substitution, insertion, deletion and/or addition compared to the native or genomic sequence; removal of one or more intron; deletion of one or more upstream or downstream regulatory regions; and deletion of the 5′ and/or 3′ untranslated region associated with the genomic nucleic acid sequence. In some embodiments, the nucleic acid molecule encoding an IPD103 polypeptide is a non-genomic sequence.

[0054] A variety of polynucleotides that encode polypeptides of the disclosure or related proteins are contemplated. Such polynucleotides are useful for production of polypeptides of the disclosure in host cells when operably linked to a suitable promoter, transcription termination and/or polyadenylation sequences. Such polynucleotides are useful in DNA constructs, molecular stack, and breeding stacks of the disclosure.

### Polynucleotides Encoding Polypeptides

[0055] One source of polynucleotides that encode IPD103 polypeptides or related proteins is a fern or other primitive plant species selected from but not limited to Athyrium species, Platycerium species, Pteris species, Colysis species, Nephrolepis species, Polystichium species, Thelypteris species, Tectaria species, and Davallia species, which contains an IPD103 polynucleotide of SEQ ID NO: 1, SEQ ID NO: 3, SEQ ID NO: 5, SEQ ID NO: 7, SEQ ID NO: 9, SEQ ID NO: 11, SEQ ID NO: 13, SEQ ID NO: 15, SEQ ID NO: 17, SEQ ID NO: 19, SEQ ID NO: 21, SEQ ID NO: 23, SEQ ID NO: 25, SEQ ID NO: 27, SEQ ID NO: 29, SEQ ID NO: 31, SEQ ID NO: 33, SEQ ID NO: 35 or SEQ ID NO: 37, encoding an IPD103 polypeptide of SEQ ID NO: 2, SEQ ID NO: 4, SEQ ID NO: 6, SEQ ID NO: 8, SEQ ID NO: 10, SEQ ID NO: 12, SEQ ID NO: 14, SEQ ID NO: 16, SEQ ID NO: 18, SEQ ID NO: 20, SEQ ID NO: 22, SEQ ID NO: 24, SEQ ID NO: 26, SEQ ID NO: 28, SEQ ID NO: 30, SEQ ID NO: 32, SEQ ID NO: 34, SEQ ID NO: 36, and SEQ ID NO: 38, respectively. The polynucleotides of SEQ ID NO: 1, SEQ ID NO: 3, SEQ ID NO: 5, SEQ ID NO: 7, SEQ ID NO: 9, SEQ ID NO: 11, SEQ ID NO: 13, SEQ ID NO: 15, SEQ ID NO: 17, SEQ ID NO: 19, SEQ ID NO: 21, SEQ ID NO: 23, SEQ ID NO: 25, SEQ ID NO: 27, SEQ ID NO: 29, SEQ ID NO: 31, SEQ ID NO: 33, SEQ ID NO: 35 or SEQ ID NO: 37 can be used to express IPD103 polypeptides in recombinant bacterial hosts that include but are not limited to Agrobacterium, Bacillus, Escherichia, Salmonella, Pseudomonas and Rhizobium bacterial host cells.

[0056] Polynucleotides that encode polypeptides of the disclosure can also be synthesized de novo from a polypeptide sequence of the disclosure. The sequence of the polynucleotide gene can be deduced from a polypeptide sequence of the disclosure through use of the genetic code. Computer programs such as “BackTranslate” (GCGTm Package, Acclerys, Inc. San Diego, Calif.) can be used to convert a peptide sequence to the corresponding nucleotide sequence encoding the peptide. Furthermore, synthetic polynucleotide sequences of the disclosure can be designed so that they will be expressed in plants.

[0057] In some embodiments, an “IPD103 polynucleotide” is defined as a polynucleotide, disclosed in PCT WO 2018/005411, which is incorporated herein by reference, encoding an IPD103 polypeptide having insecticidal activity.

[0058] In some embodiments, the IPD103 polynucleotide encodes an IPD103 polypeptide having at least about 40%, 45%, 50%, 51%, 52%, 53%, 54%, 55%, 56%, 57%, 58%, 59%, 60%, 61%, 62%, 63%, 64%, 65%, 66%, 67%, 68%, 69%, 70%, 71%, 72%, 73%, 74%, 75%, 76%, 77%, 78%, 79%, 80%, 81%, 82%, 83%, 84%, 85%, 86%, 87%, 88%, 89%, 90%, 91%, 92%, 93%, 94%, 95%, 96%, 97%, 98%, 99% or greater sequence identity compared to SEQ ID NO: 2, SEQ ID NO: 4, SEQ ID NO: 6, SEQ ID NO: 8, SEQ ID NO: 10, SEQ ID NO: 12, SEQ ID NO: 14, SEQ ID NO: 16, SEQ ID NO: 18, SEQ ID NO: 20, SEQ ID NO: 22, SEQ ID NO: 24, SEQ ID NO: 26, SEQ ID NO: 28, SEQ ID NO: 30, SEQ ID NO: 32, SEQ ID NO: 34, SEQ ID NO: 36 or SEQ ID NO: 38.

[0059] In some embodiments, the IPD103 polynucleotide encodes an IPD103 polypeptide having at least 95% identity to the amino acid sequence of SEQ ID NO: 2, SEQ ID NO: 4, SEQ ID NO: 6, SEQ ID NO: 8, SEQ ID NO: 10, SEQ ID NO: 12, SEQ ID NO: 14, SEQ ID NO: 16, SEQ ID NO: 18, SEQ ID NO: 20, SEQ ID NO: 22, SEQ ID NO: 24, SEQ ID NO: 26, SEQ ID NO: 28, SEQ ID NO: 30, SEQ ID NO: 32, SEQ ID NO: 34, SEQ ID NO: 36 or SEQ ID NO: 38.

[0060] In some embodiments, the IPD103 polynucleotide encodes an IPD103 polypeptide comprises the amino acid sequence of SEQ ID NO: 2, SEQ ID NO: 4, SEQ ID NO: 6, SEQ ID NO: 8, SEQ ID NO: 10, SEQ ID NO: 12, SEQ ID NO: 14, SEQ ID NO: 16, SEQ ID NO: 18, SEQ ID NO: 20, SEQ ID NO: 22, SEQ ID NO: 24, SEQ ID NO: 26, SEQ ID NO: 28, SEQ ID NO: 30, SEQ ID NO: 32, SEQ ID NO: 34, SEQ ID NO: 36 or SEQ ID NO: 38.

[0061] In some embodiments, the polynucleotide encoding an IPD103 polypeptide is the sequence set forth in SEQ ID NO: 1, SEQ ID NO: 3, SEQ ID NO: 5, SEQ ID NO: 7, SEQ ID NO: 9, SEQ ID NO: 11, SEQ ID NO: 13, SEQ ID NO: 15, SEQ ID NO: 17, SEQ ID NO: 19, SEQ ID NO: 21, SEQ ID NO: 23, SEQ ID NO: 25, SEQ ID NO: 27, SEQ ID NO: 29, SEQ ID NO: 31, SEQ ID NO: 33, SEQ ID NO: 35 or SEQ ID NO: 37.

[0062] In some embodiments, the IPD103 polynucleotide encodes an IPD103 polypeptide comprises the amino acid sequence of SEQ ID NO: 252, SEQ ID NO: 253, SEQ ID NO: 254, SEQ ID NO: 255, SEQ ID NO: 256, SEQ ID NO: 257, SEQ ID NO: 258, SEQ ID NO: 259, SEQ ID NO:260 or SEQ ID NO: 261.

[0063] In some embodiments, the polynucleotide encoding an IPD103 polypeptide is the sequence set forth in SEQ ID NO: 242, SEQ ID NO: 243, SEQ ID NO: 244, SEQ ID NO: 245, SEQ ID NO: 246, SEQ ID NO: 247, SEQ ID NO: 248, SEQ ID NO: 249, SEQ ID NO:250 or SEQ ID NO: 251.

[0064] In some embodiments, a “PtlP-83 polynucleotide” is defined as a polynucleotide disclosed in US Publication US 21060347799 (incorporated herein by reference) encoding a PtlP-83 polypeptide having insecticidal activity.

[0065] In some embodiments, the PtlP-83 polynucleotide encodes a PtlP-83 polypeptide having at least about 40%, 45%, 50%, 51%, 52%, 53%, 54%, 55%, 56%, 57%, 58%, 59%, 60%, 61%, 62%, 63%, 64%, 65%, 66%, 67%, 68%, 69%, 70%, 71%, 72%, 73%, 74%, 75%, 76%, 77%, 78%, 79%, 80%, 81%, 82%, 83%, 84%, 85%, 86%, 87%, 88%, 89%, 90%, 91%, 92%, 93%, 94%, 95%, 96%, 97%, 98%, 99% or greater sequence identity compared to SEQ ID NO: 39, SEQ ID NO: 41, SEQ ID NO: 43, SEQ ID NO: 45, SEQ ID NO: 47, SEQ ID NO: 49, SEQ ID NO: 51, SEQ ID NO: 53, SEQ ID NO: 55, SEQ ID NO: 57, SEQ ID NO: 59 or SEQ ID NO: 61.

[0066] In some embodiments, the PtlP-83 polynucleotide encodes a PtlP-83 polypeptide comprising an amino acid sequence having at least 95% sequence identity to an amino acid sequence of SEQ ID NO: 39, SEQ ID NO: 41, SEQ ID NO: 43, SEQ ID NO: 45, SEQ ID NO: 47, SEQ ID NO: 49, SEQ ID NO: 51, SEQ ID NO: 53, SEQ ID NO: 55, SEQ ID NO: 57, SEQ ID NO: 59 or SEQ ID NO: 61.

[0067] In some embodiments, the PtlP-83 polynucleotide encodes a PtlP-83 polypeptide comprising the amino acid sequence of SEQ ID NO: 39, SEQ ID NO: 41, SEQ ID NO: 43, SEQ ID NO: 45, SEQ ID NO: 47, SEQ ID NO: 49, SEQ ID NO: 51, SEQ ID NO: 53, SEQ ID NO: 55, SEQ ID NO: 57, SEQ ID NO: 59 or SEQ ID NO: 61.

[0068] In some embodiments, polynucleotides are provided that encode a Cry1B polypeptide selected from Cry1Ba1 (Accession CAA29898, Cry1Ba2 (Accession CAA65003), Cry1Ba3 (Accession AAK63251), Cry1Ba4 (Accession AAK51084, Cry1Ba5 (Accession AB020894), Cry1Ba6 (Accession ABL60921), Cry1Ba7 (Accession HQ439781), Cry1Bb1 (AAA22344), Cry1Bb2 (Accession HQ439782), Cry1Bc1 (Accession CAA86568), Cry1Bd1 (Accession AAD10292), Cry1Bd2 (Accession AAM93496), Cry1Be1 (Accession AAC32850), Cry1Be2 (Accession AAQ52387), Cry1Be3 (Accession ACV96720), Cry1Be4 (Accession HM070026), Cry1Bf1 (Accession CAC50778), Cry1Bf2 (Accession AAQ52380), Cry1Bg1 (Accession AA039720), Cry1Bh1 (Accession HQ589331), and Cry1Bi1 (Accession KC156700).

[0069] In some embodiments, polynucleotides are provided that encode a Cry1B polypeptide selected from a Cry1B of U.S. Pat. Nos. 8,772,577, 9,404,121, US Publication US 2016 0194364, and U.S. Ser. No. 62/607,372, which are incorporated herein by reference.

[0070] In some embodiments, polynucleotides are provided that encode a Cry1B polypeptide selected from the amino acid sequence of SEQ ID NO: 63, SEQ ID NO: 109, SEQ ID NO: 111, SEQ ID NO: 221, SEQ ID NO: 223, SEQ ID NO: 224, SEQ ID NO: 225, SEQ ID NO: 226, SEQ ID NO: 227, SEQ ID NO: 228, and SEQ ID NO: 229.

[0071] In some embodiments, polynucleotides are provided that encode a variant Cry1B polypeptide of US Publication US 20170226164 and WO Publication WO2017/180715, which are incorporated herein by reference.

[0072] In some embodiments, polynucleotides are provided that encode a variant Cry1B polypeptide comprising the amino acid sequence of SEQ ID NO: 65, SEQ ID NO: 67, SEQ ID NO: 69, SEQ ID NO: 71, SEQ ID NO: 73, SEQ ID NO: 75, SEQ ID NO: 77, SEQ ID NO: 79, SEQ ID NO: 81, SEQ ID NO: 83, SEQ ID NO: 84, SEQ ID NO: 85, SEQ ID NO: 87, SEQ ID NO: 89, SEQ ID NO: 91, SEQ ID NO: 93, SEQ ID NO: 95, SEQ ID NO: 97, SEQ ID NO: 99, SEQ ID NO: 101, SEQ ID NO: 103, SEQ ID NO: 105, SEQ ID NO: 107, SEQ ID NO: 113, SEQ ID NO: 114, SEQ ID NO: 115, SEQ ID NO: 116, SEQ ID NO: 117, SEQ ID NO: 118, SEQ ID NO: 119, SEQ ID NO: 120, SEQ ID NO: 121, SEQ ID NO: 122, SEQ ID NO: 123, SEQ ID NO: 124, SEQ ID NO: 125, SEQ ID NO: 126, SEQ ID NO: 127, SEQ ID NO: 128, SEQ ID NO: 129, SEQ ID NO: 130, SEQ ID NO: 131, SEQ ID NO: 132, SEQ ID NO: 133, SEQ ID NO: 134, SEQ ID NO: 135, SEQ ID NO: 136, SEQ ID NO: 137, SEQ ID NO: 138, SEQ ID NO: 139, SEQ ID NO: 140, SEQ ID NO: 141, SEQ ID NO: 142, SEQ ID NO: 143, SEQ ID NO: 144, SEQ ID NO: 145, SEQ ID NO: 146, SEQ ID NO: 147, SEQ ID NO: 148, SEQ ID NO: 149, SEQ ID NO: 150, SEQ ID NO: 151, SEQ ID NO: 152, SEQ ID NO: 153, SEQ ID NO: 154, SEQ ID NO: 155, SEQ ID NO: 156, SEQ ID NO: 157, SEQ ID NO: 158, SEQ ID NO: 159, SEQ ID NO: 160, SEQ ID NO: 161, SEQ ID NO: 162, SEQ ID NO: 163, SEQ ID NO: 164, SEQ ID NO: 165, SEQ ID NO: 166, SEQ ID NO: 167, SEQ ID NO: 168, SEQ ID NO: 169, SEQ ID NO: 170, SEQ ID NO: 171, SEQ ID NO: 172, SEQ ID NO: 173, SEQ ID NO: 174, SEQ ID NO: 175, SEQ ID NO: 176, SEQ ID NO: 177, SEQ ID NO: 178, SEQ ID NO: 179, SEQ ID NO: 180, SEQ ID NO: 181, SEQ ID NO: 182, SEQ ID NO: 183, SEQ ID NO: 184, SEQ ID NO: 185, SEQ ID NO: 186, SEQ ID NO: 187, SEQ ID NO: 188, SEQ ID NO: 189, SEQ ID NO: 190, SEQ ID NO: 191, SEQ ID NO: 191, SEQ ID NO: 192, SEQ ID NO: 193, SEQ ID NO: 194, SEQ ID NO: 195, SEQ ID NO: 196, SEQ ID NO: 197, SEQ ID NO: 198, SEQ ID NO: 199, SEQ ID NO: 200, SEQ ID NO: 201, SEQ ID NO: 202, SEQ ID NO: 203, SEQ ID NO: 204, SEQ ID NO: 205, SEQ ID NO: 206, SEQ ID NO: 207, SEQ ID NO: 208, SEQ ID NO: 209, SEQ ID NO: 210 or SEQ ID NO: 211.

[0073] In some embodiments, polynucleotides are provided that encode a variant Cry1B polypeptide selected from SEQ ID NO: 65, SEQ ID NO: 67, SEQ ID NO: 69, SEQ ID NO: 71, SEQ ID NO: 73, SEQ ID NO: 75, SEQ ID NO: 77, SEQ ID NO: 79, SEQ ID NO: 81, SEQ ID NO: 83, SEQ ID NO: 84, SEQ ID NO: 85, SEQ ID NO: 87, SEQ ID NO: 89, SEQ ID NO: 91, SEQ ID NO: 93, SEQ ID NO: 95, SEQ ID NO: 97, SEQ ID NO: 99, SEQ ID NO: 101, SEQ ID NO: 103, SEQ ID NO: 105, SEQ ID NO: 107, SEQ ID NO: 113, SEQ ID NO: 114, SEQ ID NO: 115, SEQ ID NO: 116, SEQ ID NO: 117, SEQ ID NO: 118, SEQ ID NO: 119, SEQ ID NO: 120, SEQ ID NO: 121, SEQ ID NO: 122, SEQ ID NO: 123, SEQ ID NO: 124, SEQ ID NO: 125, SEQ ID NO: 126, SEQ ID NO: 127, SEQ ID NO: 128, SEQ ID NO: 129, SEQ ID NO: 130, SEQ ID NO: 131, SEQ ID NO: 132, SEQ ID NO: 133, SEQ ID NO: 134, SEQ ID NO: 135, SEQ ID NO: 136, SEQ ID NO: 137, SEQ ID NO: 138, SEQ ID NO: 139, SEQ ID NO: 140, SEQ ID NO: 141, SEQ ID NO: 142, SEQ ID NO: 143, SEQ ID NO: 144, SEQ ID NO: 145, SEQ ID NO: 146, SEQ ID NO: 147, SEQ ID NO: 148, SEQ ID NO: 149, SEQ ID NO: 150, SEQ ID NO: 151, SEQ ID NO: 152, SEQ ID NO: 153, SEQ ID NO: 154, SEQ ID NO: 155, SEQ ID NO: 156, SEQ ID NO: 157, SEQ ID NO: 158, SEQ ID NO: 159, SEQ ID NO: 160, SEQ ID NO: 161, SEQ ID NO: 162, SEQ ID NO: 163, SEQ ID NO: 164, SEQ ID NO: 165, SEQ ID NO: 166, SEQ ID NO: 167, SEQ ID NO: 168, SEQ ID NO: 169, SEQ ID NO: 170, SEQ ID NO: 171, SEQ ID NO: 172, SEQ ID NO: 173, SEQ ID NO: 174, SEQ ID NO: 175, SEQ ID NO: 176, SEQ ID NO: 177, SEQ ID NO: 178, SEQ ID NO: 179, SEQ ID NO: 180, SEQ ID NO: 181, SEQ ID NO: 182, SEQ ID NO: 183, SEQ ID NO: 184, SEQ ID NO: 185, SEQ ID NO: 186, SEQ ID NO: 187, SEQ ID NO: 188, SEQ ID NO: 189, SEQ ID NO: 190, SEQ ID NO: 191, SEQ ID NO: 191, SEQ ID NO: 192, SEQ ID NO: 193, SEQ ID NO: 194, SEQ ID NO: 195, SEQ ID NO: 196, SEQ ID NO: 197, SEQ ID NO: 198, SEQ ID NO: 199, SEQ ID NO: 200, SEQ ID NO: 201, SEQ ID NO: 202, SEQ ID NO: 203, SEQ ID NO: 204, SEQ ID NO: 205, SEQ ID NO: 206, SEQ ID NO: 207, SEQ ID NO: 208, SEQ ID NO: 209, SEQ ID NO: 210, and SEQ ID NO: 211.

[0074] In some embodiments, polynucleotides are provided that encode a Cry1C polypeptide selected from Cry1Ca1 (Accession CAA30396), Cry1Ca2 (Accession CAA31951), Cry1Ca3 (Accession AAA22343), Cry1Ca4 (Accession CAA01886), Cry1Ca5 (Accession CAA65457), Cry1Ca6 (Accession AAF37224), Cry1Ca7 (Accession AAG50438), Cry1Ca8 (Accession AAM00264), Cry1Ca9 (Accession AAL79362), Cry1Ca10 (Accession AAN16462), Cry1Ca11 (Accession AAX53094), Cry1Ca12 (Accession HM070027), Cry1Ca13 (Accession HQ412621), Cry1Ca14 (Accession JN651493), Cry1Cb1 (Accession M97880), Cry1Cb2 (Accession AAG35409), Cry1Cb3 (Accession ACD50894), Cry1Cb-like (Accession AAX63901), Cry1Da1 (Accession CAA38099), Cry1Da2 (Accession 176415), and Cry1Da3 (Accession HQ43978).

[0075] In some embodiments, polynucleotides are provided that encode a Cry1C polypeptide comprises an amino acid sequence having at least 95% sequence identity to the Cry1Ca polypeptide of SEQ ID NO: 230.

[0076] In some embodiments, polynucleotides are provided that encode a Cry1C polypeptide comprises the amino acid sequence of SEQ ID NO: 230.

[0077] In some embodiments, polynucleotides are provided that encode a Cry1D polypeptide selected from Cry1Da1 (Accession CAA38099), Cry1Da2 (Accession 176415), Cry1Da3 (Accession HQ439784), Cry1Db1 (Accession CAA80234), Cry1Db2 (Accession AAK48937), and Cry1Dc1 (Accession ABK35074).

[0078] In some embodiments, polynucleotides are provided that encode a Cry1D polypeptide comprises an amino acid sequence having at least 95% sequence identity to the Cry1 Da polypeptide of SEQ ID NO: 231, SEQ ID NO: 233, SEQ ID NO: 235, SEQ ID NO: 237, SEQ ID NO: 239 or SEQ ID NO: 241.

[0079] In some embodiments, polynucleotides are provided that encode a Cry1D polypeptide comprises the amino acid sequence of a Cry1 Da polypeptide of SEQ ID NO: 231, SEQ ID NO: 233, SEQ ID NO: 235, SEQ ID NO: 237, SEQ ID NO: 239 or SEQ ID NO: 241.

[0080] In some embodiments, polynucleotides are provided that encode a Cry1J polypeptide selected from Cry1Ja1 (Accession AAA22341), Cry1Ja2 (Accession HM070030), Cry1Ja3 (Accession JQ228425), Cry1Jb1 (Accession AAA98959), Cry1Jc1 (Accession AAC31092), Cry1Jc2 (Accession AAQ52372), and Cry1Jd1 (Accession CAC50779).

[0081] In some embodiments, polynucleotides are provided that encode a variant Cry1J polypeptide of US Publication Number US20170240603.

[0082] In some embodiments, polynucleotides are provided that encode a Cry1J variant polypeptide comprising an amino acid sequence having at least 95% identity to SEQ ID NO: 213, SEQ ID NO: 215, SEQ ID NO: 217 or SEQ ID NO: 219.

[0083] In some embodiments, polynucleotides are provided that encode a Cry1J variant polypeptide comprising the amino acid sequence of SEQ ID NO: 213, SEQ ID NO: 215, SEQ ID NO: 217 or SEQ ID NO: 219.

[0084] In some embodiments, polynucleotides are provided that encode a variant Cry1J polypeptide selected from SEQ ID NO: 213, SEQ ID NO: 215, SEQ ID NO: 217 or SEQ ID NO: 219.

[0085] In some embodiments, the nucleic acid molecule encoding a polypeptide of the disclosure is a non-genomic nucleic acid sequence. As used herein a “non-genomic nucleic acid sequence” or “non-genomic nucleic acid molecule” or “non-genomic polynucleotide” refers to a nucleic acid molecule that has one or more change in the nucleic acid sequence compared to a native or genomic nucleic acid sequence. In some embodiments the change to a native or genomic nucleic acid molecule includes but is not limited to: changes in the nucleic acid sequence due to the degeneracy of the genetic code; optimization of the nucleic acid sequence for expression in plants; changes in the nucleic acid sequence to introduce at least one amino acid substitution, insertion, deletion and/or addition compared to the native or genomic sequence; removal of one or more intron associated with the genomic nucleic acid sequence; insertion of one or more heterologous introns; deletion of one or more upstream or downstream regulatory regions associated with the genomic nucleic acid sequence; insertion of one or more heterologous upstream or downstream regulatory regions; deletion of the 5′ and/or 3′ untranslated region associated with the genomic nucleic acid sequence; insertion of a heterologous 5′ and/or 3′ untranslated region; and modification of a polyadenylation site. In some embodiments, the non-genomic nucleic acid molecule is a synthetic nucleic acid sequence.

[0086] In some embodiments, the nucleic acid molecule encoding an IPD103 polypeptide is a non-genomic polynucleotide having a nucleotide sequence having at least 50%, 51%, 52%, 53%, 54%, 55%, 56%, 57%, 58%, 59%, 60%, 61%, 62%, 63%, 64%, 65%, 66%, 67%, 68%, 69%, 70%, 71%, 72%, 73%, 74%, 75%, 76%, 77%, 78%, 79%, 80%, 81%, 82%, 83%, 84%, 85%, 86%, 87%, 88%, 89%, 90%, 91%, 92%, 93%, 94%, 95%, 96%, 97%, 98%, 99% or greater identity, to the nucleic acid sequence of SEQ ID NO: 1, SEQ ID NO: 3, SEQ ID NO: 5, SEQ ID NO: 7, SEQ ID NO: 9, SEQ ID NO: 11, SEQ ID NO: 13, SEQ ID NO: 15, SEQ ID NO: 17, SEQ ID NO: 19, SEQ ID NO: 21, SEQ ID NO: 23, SEQ ID NO: 25, SEQ ID NO: 27, SEQ ID NO: 29, SEQ ID NO: 31, SEQ ID NO: 33, SEQ ID NO: 35 or SEQ ID NO: 37, wherein the IPD103 polypeptide has insecticidal activity.

[0087] In some embodiments, the IPD103 polynucleotide encodes an IPD103 polypeptide comprising an amino acid sequence having at least about 80%, 81%, 82%, 83%, 84%, 85%, 86%, 87%, 88%, 89%, 90%, 91%, 92%, 93%, 94%, 95%, 96%, 97%, 98%, 99% or greater identity across the entire length of the amino acid sequence of SEQ ID NO: 2.

### Compositions

[0088] Compositions comprising a molecular stack or breeding stack comprising an IPD103 polypeptide and at least one other pesticidal protein are also embraced.

### Nucleotide Constructs, Expression Cassettes and Vectors

[0089] The use of the term “nucleotide constructs” or “DNA construct” as used herein is not intended to limit the embodiments to nucleotide constructs comprising DNA. Nucleotide constructs particularly polynucleotides and oligonucleotides composed of ribonucleotides and combinations of ribonucleotides and deoxyribonucleotides may also be employed in the methods disclosed herein. The nucleotide constructs, nucleic acids, and nucleotide sequences of the embodiments additionally encompass all complementary forms of such constructs, molecules, and sequences. Further, the nucleotide constructs, nucleotide molecules, and nucleotide sequences of the embodiments encompass all nucleotide constructs, molecules, and sequences which can be employed in the methods of the embodiments for transforming plants including, but not limited to, those comprised of deoxyribonucleotides, ribonucleotides, and combinations thereof. Such deoxyribonucleotides and ribonucleotides include both naturally occurring molecules and synthetic analogues. The nucleotide constructs, nucleic acids, and nucleotide sequences of the embodiments also encompass all forms of nucleotide constructs including, but not limited to, single-stranded forms, double-stranded forms, hairpins, stem-and-loop structures and the like.

[0090] A further embodiment relates to a transformed organism such as an organism selected from plant and insect cells, bacteria, yeast, baculovirus, protozoa, nematodes and algae. The transformed organism comprises a DNA molecule of the embodiments, an expression cassette comprising the DNA molecule or a vector comprising the expression cassette, which may be stably incorporated into the genome of the transformed organism.

[0091] The sequences of the embodiments are provided in DNA constructs for expression in the organism of interest. The construct will include 5′ and 3′ regulatory sequences operably linked to a sequence of the embodiments. The term “operably linked” as used herein refers to a functional linkage between a promoter and a second sequence, wherein the promoter sequence initiates and mediates transcription of the DNA sequence corresponding to the second sequence. Generally, operably linked means that the nucleic acid sequences being linked are contiguous and where necessary to join two protein coding regions in the same reading frame. The construct may additionally contain at least one additional gene to be cotransformed into the organism. Alternatively, the additional gene(s) can be provided on multiple DNA constructs.

[0092] Such a DNA construct is provided with a plurality of restriction sites for insertion of the IPD103 polypeptide gene sequence of the disclosure to be under the transcriptional regulation of the regulatory regions. The DNA construct may additionally contain selectable marker genes.

[0093] The DNA construct will generally include in the 5′ to 3′ direction of transcription: a transcriptional and translational initiation region (i.e., a promoter), a DNA sequence of the embodiments, and a transcriptional and translational termination region (i.e., termination region) functional in the organism serving as a host. The transcriptional initiation region (i.e., the promoter) may be native, analogous, foreign or heterologous to the host organism and/or to the sequence of the embodiments. Additionally, the promoter may be the natural sequence or alternatively a synthetic sequence. The term “foreign” as used herein indicates that the promoter is not found in the native organism into which the promoter is introduced. Where the promoter is “foreign” or “heterologous” to the sequence of the embodiments, it is intended that the promoter is not the native or naturally occurring promoter for the operably linked sequence of the embodiments. As used herein, a chimeric gene comprises a coding sequence operably linked to a transcription initiation region that is heterologous to the coding sequence. Where the promoter is a native or natural sequence, the expression of the operably linked sequence is altered from the wild-type expression, which results in an alteration in phenotype.

[0094] In some embodiments, DNA constructs are provided comprising: a polynucleotide encoding an IPD103 polypeptide having insecticidal activity; and one or more polynucleotide selected from: a polynucleotide encoding a PtlP-83 polypeptide having insecticidal activity; a polynucleotide encoding a Cry1B polypeptide having insecticidal activity; a polynucleotide encoding a variant Cry1B polypeptide having insecticidal activity; a polynucleotide encoding a Cry1C polypeptide having insecticidal activity; a polynucleotide encoding a Cry1D polypeptide having insecticidal activity; and a polynucleotide encoding a Cry1J polypeptide having insecticidal activity.

[0095] In some embodiments, DNA constructs are provided wherein the polynucleotide encoding the polypeptides are each operably linked to a heterologous regulatory element.

[0096] In some embodiments, the DNA construct comprises a polynucleotide disclosed in PCT WO 2018/005411, which is incorporated herein by reference, encoding an IPD103 polypeptide having insecticidal activity.

[0097] In some embodiments, the DNA construct comprises a polynucleotide encoding an IPD103 polypeptide having at least 95% identity to SEQ ID NO: 2, SEQ ID NO: 4, SEQ ID NO: 6, SEQ ID NO: 8, SEQ ID NO: 10, SEQ ID NO: 12, SEQ ID NO: 14, SEQ ID NO: 16, SEQ ID NO: 18, SEQ ID NO: 20, SEQ ID NO: 22, SEQ ID NO: 24, SEQ ID NO: 26, SEQ ID NO: 28, SEQ ID NO: 30, SEQ ID NO: 32, SEQ ID NO: 34, SEQ ID NO: 36 or SEQ ID NO: 38.

[0098] In some embodiments, the DNA comprises a polynucleotide encoding an IPD103 polypeptide of SEQ ID NO: 2, SEQ ID NO: 4, SEQ ID NO: 6, SEQ ID NO: 8, SEQ ID NO: 10, SEQ ID NO: 12, SEQ ID NO: 14, SEQ ID NO: 16, SEQ ID NO: 18, SEQ ID NO: 20, SEQ ID NO: 22, SEQ ID NO: 24, SEQ ID NO: 26, SEQ ID NO: 28, SEQ ID NO: 30, SEQ ID NO: 32, SEQ ID NO: 34, SEQ ID NO: 36 or SEQ ID NO: 38.

[0099] In some embodiments, the DNA construct comprises a PtlP-83 polynucleotide disclosed in US Publication US 21060347799 encoding a PtlP-83 polypeptide having insecticidal activity.

[0100] In some embodiments, the DNA construct comprises a PtlP-83 polynucleotide encoding a PtlP-83 polypeptide having at least about 40%, 45%, 50%, 51%, 52%, 53%, 54%, 55%, 56%, 57%, 58%, 59%, 60%, 61%, 62%, 63%, 64%, 65%, 66%, 67%, 68%, 69%, 70%, 71%, 72%, 73%, 74%, 75%, 76%, 77%, 78%, 79%, 80%, 81%, 82%, 83%, 84%, 85%, 86%, 87%, 88%, 89%, 90%, 91%, 92%, 93%, 94%, 95%, 96%, 97%, 98%, 99% or greater sequence identity compared to SEQ ID NO: 39, SEQ ID NO: 41, SEQ ID NO: 43, SEQ ID NO: 45, SEQ ID NO: 47, SEQ ID NO: 49, SEQ ID NO: 51, SEQ ID NO: 53, SEQ ID NO: 55, SEQ ID NO: 57, SEQ ID NO: 59 or SEQ ID NO: 61.

[0101] In some embodiments, the DNA construct comprises a PtlP-83 polynucleotide encoding a PtlP-83 polypeptide comprising an amino acid sequence having at least 95% sequence identity to an amino acid sequence of SEQ ID NO: 39, SEQ ID NO: 41, SEQ ID NO: 43, SEQ ID NO: 45, SEQ ID NO: 47, SEQ ID NO: 49, SEQ ID NO: 51, SEQ ID NO: 53, SEQ ID NO: 55, SEQ ID NO: 57, SEQ ID NO: 59 or SEQ ID NO: 61.

[0102] In some embodiments, the DNA construct comprises a PtlP-83 polynucleotide encoding a PtlP-83 polypeptide comprising the amino acid sequence of SEQ ID NO: 39, SEQ ID NO: 41, SEQ ID NO: 43, SEQ ID NO: 45, SEQ ID NO: 47, SEQ ID NO: 49, SEQ ID NO: 51, SEQ ID NO: 53, SEQ ID NO: 55, SEQ ID NO: 57, SEQ ID NO: 59 or SEQ ID NO: 61.

[0103] In some embodiments, the DNA construct comprises a polynucleotides encode a Cry1B polypeptide selected from Cry1Ba1 (Accession CAA29898, Cry1Ba2 (Accession CAA65003), Cry1Ba3 (Accession AAK63251), Cry1Ba4 (Accession AAK51084, Cry1Ba5 (Accession AB020894), Cry1Ba6 (Accession ABL60921), Cry1Ba7 (Accession HQ439781), Cry1Bb1 (AAA22344), Cry1Bb2 (Accession HQ439782), Cry1Bc1 (Accession CAA86568), Cry1Bd1 (Accession AAD10292), Cry1Bd2 (Accession AAM93496), Cry1Be1 (Accession AAC32850), Cry1Be2 (Accession AAQ52387), Cry1Be3 (Accession ACV96720), Cry1Be4 (Accession HM070026), Cry1Bf1 (Accession CAC50778), Cry1Bf2 (Accession AAQ52380), Cry1Bg1 (Accession AA039720), Cry1Bh1 (Accession HQ589331), and Cry1Bi1 (Accession KC156700).

[0104] In some embodiments, the DNA construct comprises a polynucleotide encoding a Cry1B polypeptide selected from a Cry1B of U.S. Pat. Nos. 8,772,577, 9,404,121, US Publication US 20160194364, and U.S. Ser. No. 62/607,372, which are incorporated herein by reference.

[0105] In some embodiments, the DNA construct comprises a polynucleotide encoding a Cry1B polypeptide selected from the amino acid sequence of SEQ ID NO: 63, SEQ ID NO: 109, SEQ ID NO: 111, SEQ ID NO: 221, SEQ ID NO: 223, SEQ ID NO: 224, SEQ ID NO: 225, SEQ ID NO: 226, SEQ ID NO: 227, SEQ ID NO: 228, and SEQ ID NO: 229.

[0106] In some embodiments, the DNA construct comprises a polynucleotide encoding a variant Cry1B polypeptide of US Publication US 20170226164 and WO Publication WO2017/180715, which are incorporated herein by reference.

[0107] In some embodiments, the DNA construct comprises a polynucleotide encoding a variant Cry1B polypeptide comprising the amino acid sequence of SEQ ID NO: 65, SEQ ID NO: 67, SEQ ID NO: 69, SEQ ID NO: 71, SEQ ID NO: 73, SEQ ID NO: 75, SEQ ID NO: 77, SEQ ID NO: 79, SEQ ID NO: 81, SEQ ID NO: 83, SEQ ID NO: 84, SEQ ID NO: 85, SEQ ID NO: 87, SEQ ID NO: 89, SEQ ID NO: 91, SEQ ID NO: 93, SEQ ID NO: 95, SEQ ID NO: 97, SEQ ID NO: 99, SEQ ID NO: 101, SEQ ID NO: 103, SEQ ID NO: 105, SEQ ID NO: 107, SEQ ID NO: 113, SEQ ID NO: 114, SEQ ID NO: 115, SEQ ID NO: 116, SEQ ID NO: 117, SEQ ID NO: 118, SEQ ID NO: 119, SEQ ID NO: 120, SEQ ID NO: 121, SEQ ID NO: 122, SEQ ID NO: 123, SEQ ID NO: 124, SEQ ID NO: 125, SEQ ID NO: 126, SEQ ID NO: 127, SEQ ID NO: 128, SEQ ID NO: 129, SEQ ID NO: 130, SEQ ID NO: 131, SEQ ID NO: 132, SEQ ID NO: 133, SEQ ID NO: 134, SEQ ID NO: 135, SEQ ID NO: 136, SEQ ID NO: 137, SEQ ID NO: 138, SEQ ID NO: 139, SEQ ID NO: 140, SEQ ID NO:141, SEQ ID NO:142, SEQ ID NO:143, SEQ ID NO:144, SEQ ID NO: 145, SEQ ID NO: 146, SEQ ID NO: 147, SEQ ID NO: 148, SEQ ID NO: 149, SEQ ID NO: 150, SEQ ID NO: 151, SEQ ID NO: 152, SEQ ID NO: 153, SEQ ID NO: 154, SEQ ID NO: 155, SEQ ID NO: 156, SEQ ID NO: 157, SEQ ID NO: 158, SEQ ID NO: 159, SEQ ID NO: 160, SEQ ID NO: 161, SEQ ID NO: 162, SEQ ID NO: 163, SEQ ID NO: 164, SEQ ID NO: 165, SEQ ID NO: 166, SEQ ID NO: 167, SEQ ID NO: 168, SEQ ID NO: 169, SEQ ID NO: 170, SEQ ID NO: 171, SEQ ID NO: 172, SEQ ID NO: 173, SEQ ID NO: 174, SEQ ID NO: 175, SEQ ID NO: 176, SEQ ID NO: 177, SEQ ID NO: 178, SEQ ID NO: 179, SEQ ID NO: 180, SEQ ID NO: 181, SEQ ID NO: 182, SEQ ID NO: 183, SEQ ID NO: 184, SEQ ID NO: 185, SEQ ID NO: 186, SEQ ID NO: 187, SEQ ID NO: 188, SEQ ID NO: 189, SEQ ID NO: 190, SEQ ID NO: 191, SEQ ID NO: 191, SEQ ID NO: 192, SEQ ID NO: 193, SEQ ID NO: 194, SEQ ID NO: 195, SEQ ID NO: 196, SEQ ID NO: 197, SEQ ID NO: 198, SEQ ID NO: 199, SEQ ID NO: 200, SEQ ID NO: 201, SEQ ID NO: 202, SEQ ID NO: 203, SEQ ID NO: 204, SEQ ID NO: 205, SEQ ID NO: 206, SEQ ID NO: 207, SEQ ID NO: 208, SEQ ID NO: 209, SEQ ID NO: 210 or SEQ ID NO: 211.

[0108] In some embodiments, the DNA construct comprises a polynucleotide encoding a variant Cry1B polypeptide selected from SEQ ID NO: 65, SEQ ID NO: 67, SEQ ID NO: 69, SEQ ID NO: 71, SEQ ID NO: 73, SEQ ID NO: 75, SEQ ID NO: 77, SEQ ID NO: 79, SEQ ID NO: 81, SEQ ID NO: 83, SEQ ID NO: 84, SEQ ID NO: 85, SEQ ID NO: 87, SEQ ID NO: 89, SEQ ID NO: 91, SEQ ID NO: 93, SEQ ID NO: 95, SEQ ID NO: 97, SEQ ID NO: 99, SEQ ID NO: 101, SEQ ID NO: 103, SEQ ID NO: 105, SEQ ID NO: 107, SEQ ID NO: 113, SEQ ID NO: 114, SEQ ID NO: 115, SEQ ID NO: 116, SEQ ID NO: 117, SEQ ID NO: 118, SEQ ID NO: 119, SEQ ID NO: 120, SEQ ID NO: 121, SEQ ID NO: 122, SEQ ID NO: 123, SEQ ID NO: 124, SEQ ID NO: 125, SEQ ID NO: 126, SEQ ID NO: 127, SEQ ID NO: 128, SEQ ID NO: 129, SEQ ID NO: 130, SEQ ID NO: 131, SEQ ID NO: 132, SEQ ID NO: 133, SEQ ID NO: 134, SEQ ID NO: 135, SEQ ID NO: 136, SEQ ID NO: 137, SEQ ID NO: 138, SEQ ID NO: 139, SEQ ID NO: 140, SEQ ID NO: 141, SEQ ID NO: 142, SEQ ID NO: 143, SEQ ID NO: 144, SEQ ID NO: 145, SEQ ID NO: 146, SEQ ID NO: 147, SEQ ID NO: 148, SEQ ID NO: 149, SEQ ID NO: 150, SEQ ID NO: 151, SEQ ID NO: 152, SEQ ID NO: 153, SEQ ID NO: 154, SEQ ID NO: 155, SEQ ID NO: 156, SEQ ID NO: 157, SEQ ID NO: 158, SEQ ID NO: 159, SEQ ID NO: 160, SEQ ID NO: 161, SEQ ID NO: 162, SEQ ID NO: 163, SEQ ID NO: 164, SEQ ID NO: 165, SEQ ID NO: 166, SEQ ID NO: 167, SEQ ID NO: 168, SEQ ID NO: 169, SEQ ID NO: 170, SEQ ID NO: 171, SEQ ID NO: 172, SEQ ID NO: 173, SEQ ID NO: 174, SEQ ID NO: 175, SEQ ID NO: 176, SEQ ID NO: 177, SEQ ID NO: 178, SEQ ID NO: 179, SEQ ID NO: 180, SEQ ID NO: 181, SEQ ID NO: 182, SEQ ID NO: 183, SEQ ID NO: 184, SEQ ID NO: 185, SEQ ID NO: 186, SEQ ID NO: 187, SEQ ID NO: 188, SEQ ID NO: 189, SEQ ID NO: 190, SEQ ID NO: 191, SEQ ID NO: 191, SEQ ID NO: 192, SEQ ID NO: 193, SEQ ID NO: 194, SEQ ID NO: 195, SEQ ID NO: 196, SEQ ID NO: 197, SEQ ID NO: 198, SEQ ID NO: 199, SEQ ID NO: 200, SEQ ID NO: 201, SEQ ID NO: 202, SEQ ID NO: 203, SEQ ID NO: 204, SEQ ID NO: 205, SEQ ID NO: 206, SEQ ID NO: 207, SEQ ID NO: 208, SEQ ID NO: 209, SEQ ID NO: 210, and SEQ ID NO: 211.

[0109] In some embodiments, the DNA construct comprises a polynucleotide encoding a Cry1C polypeptide selected from Cry1Ca1 (Accession CAA30396), Cry1Ca2 (Accession CAA31951), Cry1Ca3 (Accession AAA22343), Cry1Ca4 (Accession CAA01886), Cry1Ca5 (Accession CAA65457), Cry1Ca6 (Accession AAF37224), Cry1Ca7 (Accession AAG50438), Cry1Ca8 (Accession AAM00264), Cry1Ca9 (Accession AAL79362), Cry1Ca10 (Accession AAN16462), Cry1Ca11 (Accession AAX53094), Cry1Ca12 (Accession HM070027), Cry1Ca13 (Accession HQ412621), Cry1Ca14 (Accession JN651493), Cry1Cb1 (Accession M97880), Cry1Cb2 (Accession AAG35409), Cry1Cb3 (Accession ACD50894), Cry1Cb-like (Accession AAX63901), Cry1Da1 (Accession CAA38099), Cry1Da2 (Accession 176415), and Cry1Da3 (Accession HQ43978).

[0110] In some embodiments, the Cry1C polypeptide comprises an amino acid sequence having at least 95% sequence identity to CryCa polypeptide.

[0111] In some embodiments, the Cry1C polypeptide comprises the amino acid sequence of a Cry1Ca polypeptide.

[0112] In some embodiments, the DNA construct comprises a polynucleotide encoding a Cry1D polypeptide selected from Cry1Da1 (Accession CAA38099), Cry1Da2 (Accession 176415), Cry1Da3 (Accession HQ439784), Cry1Db1 (Accession CAA80234), Cry1Db2 (Accession AAK48937), and Cry1Dc1 (Accession ABK35074).

[0113] In some embodiments, the Cry1D polypeptide comprises an amino acid sequence having at least 95% sequence identity to Cry1 Da polypeptide.

[0114] In some embodiments, the Cry1D polypeptide comprises the amino acid sequence of a Cry1 Da polypeptide.

[0115] In some embodiments, the DNA construct comprises a polynucleotide encoding a Cry1J polypeptide selected from Cry1Ja1 (Accession AAA22341), Cry1Ja2 (Accession HM070030), Cry1Ja3 (Accession JQ228425), Cry1Jb1 (Accession AAA98959), Cry1Jc1 (Accession AAC31092), Cry1Jc2 (Accession AAQ52372), and Cry1Jd1 (Accession CAC50779).

[0116] In some embodiments, the DNA construct comprises a polynucleotide encoding a variant Cry1J polypeptide of US Publication Number US20170240603.

[0117] In some embodiments, the DNA construct comprises a polynucleotide encoding a Cry1J variant polypeptide comprising an amino acid sequence having at least 95% identity to SEQ ID NO: 213, SEQ ID NO: 215, SEQ ID NO: 217 or SEQ ID NO: 219.

[0118] In some embodiments, the DNA construct comprises a polynucleotide encoding a Cry1J variant polypeptide comprising the amino acid sequence of SEQ ID NO: 213, SEQ ID NO: 215, SEQ ID NO: 217 or SEQ ID NO: 219.

[0119] In some embodiments, the DNA construct comprises a polynucleotide encoding a variant Cry1J polypeptide selected from SEQ ID NO: 213, SEQ ID NO: 215, SEQ ID NO: 217 or SEQ ID NO: 219.

[0120] In some embodiments, the DNA construct may also include a transcriptional enhancer sequence. As used herein, the term an “enhancer” refers to a DNA sequence which can stimulate promoter activity, and may be an innate element of the promoter or a heterologous element inserted to enhance the level or tissue-specificity of a promoter. Various enhancers, including for example, introns with gene expression enhancing properties in plants (US Patent Application Publication Number 2009/0144863, the ubiquitin intron (i.e., the maize ubiquitin intron 1 (see, for example, NCBI sequence S94464)), the omega enhancer or the omega prime enhancer (Gallie, et al., (1989) Molecular Biology of RNA ed. Cech (Liss, New York) 237-256 and Gallie, et al., (1987) Gene 60:217-25), the CaMV 35S enhancer (see, e.g., Benfey, et al., (1990) EMBO J. 9:1685-96) and the enhancers of U.S. Pat. No. 7,803,992 may also be used, each of which is incorporated by reference. The above list of transcriptional enhancers is not meant to be limiting. Any appropriate transcriptional enhancer can be used in the embodiments.

[0121] The termination region may be native with the transcriptional initiation region, may be native with the operably linked DNA sequence of interest, may be native with the plant host or may be derived from another source (i.e., foreign or heterologous to the promoter, the sequence of interest, the plant host or any combination thereof).

[0122] Convenient termination regions are available from the Ti-plasmid of A. tumefaciens, such as the octopine synthase and nopaline synthase termination regions. See also, Guerineau, et al., (1991) Mol. Gen. Genet. 262:141-144; Proudfoot, (1991) Cell 64:671-674; Sanfacon, et al., (1991) Genes Dev. 5:141-149; Mogen, et al., (1990) Plant Cell 2:1261-1272; Munroe, et al., (1990) Gene 91:151-158; Ballas, et al., (1989) Nucleic Acids Res. 17:7891-7903 and Joshi, et al., (1987) Nucleic Acid Res. 15:9627-9639.

[0123] Where appropriate, a nucleic acid may be optimized for increased expression in the host organism. Thus, where the host organism is a plant, the synthetic nucleic acids can be synthesized using plant-preferred codons for improved expression. See, for example, Campbell and Gowri, (1990) Plant Physiol. 92:1-11 for a discussion of host-preferred usage. For example, although nucleic acid sequences of the embodiments may be expressed in both monocotyledonous and dicotyledonous plant species, sequences can be modified to account for the specific preferences and GC content preferences of monocotyledons or dicotyledons as these preferences have been shown to differ (Murray et al. (1989) Nucleic Acids Res. 17:477-498). Thus, the maize-preferred for a particular amino acid may be derived from known gene sequences from maize. Maize usage for 28 genes from maize plants is listed in Table 4 of Murray, et al., supra. Methods are available for synthesizing plant-preferred genes, for example, Murray, et al., (1989) Nucleic Acids Res. 17:477-498, and Lu H et al. Mol Bio Rep 37:677-684, 2010, herein incorporated by reference. A Zea maize usage table can be also found at kazusa.or.jp//cgi-bin/show.cgi?species=4577, which can be accessed using the www prefix.

[0124] A Glycine max usage table can be found at kazusa.or.jp//cgi-bin/show.cgi?species=3847&aa=1&style=N, which can be accessed using the www prefix.

[0125] In some embodiments, the recombinant nucleic acid molecule encoding a polypeptide of the disclosure has maize optimized codons.

[0126] Additional sequence modifications are known to enhance gene expression in a cellular host. These include elimination of sequences encoding spurious polyadenylation signals, exon-intron splice site signals, transposon-like repeats, and other well-characterized sequences that may be deleterious to gene expression. The GC content of the sequence may be adjusted to levels average for a given cellular host, as calculated by reference to known genes expressed in the host cell. The term “host cell” as used herein refers to a cell which contains a vector and supports the replication and/or expression of the expression vector is intended. Host cells may be prokaryotic cells such as E. coli or eukaryotic cells such as yeast, insect, amphibian or mammalian cells or monocotyledonous or dicotyledonous plant cells. An example of a monocotyledonous host cell is a maize host cell. When possible, the sequence is modified to avoid predicted hairpin secondary mRNA structures.

[0127] The expression cassettes may additionally contain 5′ leader sequences. Such leader sequences can act to enhance translation. Translation leaders include: picornavirus leaders, for example, EMCV leader (Encephalomyocarditis 5′ noncoding region) (Elroy-Stein, et al., (1989) Proc. Natl. Acad. Sci. USA 86:6126-6130); potyvirus leaders, for example, TEV leader (Tobacco Etch Virus) (Gallie, et al., (1995) Gene 165(2):233-238), MDMV leader (Maize Dwarf Mosaic Virus), human immunoglobulin heavy-chain binding protein (BiP) (Macejak, et al., (1991) Nature 353:90-94); untranslated leader from the coat protein mRNA of alfalfa mosaic virus (AMV RNA 4) (Jobling, et al., (1987) Nature 325:622-625); tobacco mosaic virus leader (TMV) (Gallie, et al., (1989) in Molecular Biology of RNA, ed. Cech (Liss, New York), pp. 237-256) and maize chlorotic mottle virus leader (MCMV) (Lommel, et al., (1991) Virology 81:382-385). See also, Della-Cioppa, et al., (1987) Plant Physiol. 84:965-968. Such constructs may also contain a “signal sequence” or “leader sequence” to facilitate co-translational or post-translational transport of the peptide to certain intracellular structures such as the chloroplast (or other plastid), endoplasmic reticulum or Golgi apparatus.

[0128] “Signal sequence” as used herein refers to a sequence that results in cotranslational or post-translational peptide transport across the cell membrane. In eukaryotes, this typically involves secretion into the Golgi apparatus, with some resulting glycosylation. Insecticidal toxins of bacteria are often synthesized as protoxins, which are proteolytically activated in the gut of the target pest (Chang, (1987) Methods Enzymol. 153:507-516). In some embodiments, the signal sequence is located in the native sequence or may be derived from a sequence of the embodiments. “Leader sequence” as used herein refers to any sequence that when translated, results in an amino acid sequence sufficient to trigger co-translational transport of the peptide chain to a subcellular organelle. Thus, this includes leader sequences targeting transport and/or glycosylation by passage into the endoplasmic reticulum, passage to vacuoles, plastids including chloroplasts, mitochondria, and the like. Nuclear-encoded proteins targeted to the chloroplast thylakoid lumen compartment have a characteristic bipartite transit peptide, composed of a stromal targeting signal peptide and a lumen targeting signal peptide. The stromal targeting information is in the amino-proximal portion of the transit peptide. The lumen targeting signal peptide is in the carboxyl-proximal portion of the transit peptide, and contains all the information for targeting to the lumen. Recent research in proteomics of the higher plant chloroplast has achieved in the identification of numerous nuclear-encoded lumen proteins (Kieselbach et al. FEBS LETT 480:271-276, 2000; Peltier et al. Plant Cell 12:319-341, 2000; Bricker et al. Biochim. Biophys Acta 1503:350-356, 2001), the lumen targeting signal peptide of which can potentially be used in accordance with the present disclosure. About 80 proteins from Arabidopsis, as well as homologous proteins from spinach and garden pea, are reported by Kieselbach et al., Photosynthesis Research, 78:249-264, 2003. In particular, Table 2 of this publication, which is incorporated into the description herewith by reference, discloses 85 proteins from the chloroplast lumen, identified by their accession number (see also US Patent Application Publication 2009/09044298). In addition, the recently published draft version of the rice genome (Goff et al, Science 296:92-100, 2002) is a suitable source for lumen targeting signal peptide which may be used in accordance with the present disclosure.

[0129] Suitable chloroplast transit peptides (CTP) include chimeric CT's comprising but not limited to, an N-terminal domain, a central domain or a C-terminal domain from a CTP from Oryza sativa 1-decoy-D xylose-5-Phosphate Synthase Oryza sativa-Superoxide dismutase Oryza sativa-soluble starch synthase Oryza sativa-NADP-dependent Malic acid enzyme Oryza sativa-Phospho-2-dehydro-3-deoxyheptonate Aldolase 2 Oryza sativa-L-Ascorbate peroxidase 5 Oryza sativa-Phosphoglucan water dikinase, Zea Mays ssRUBISCO, Zea Mays-beta-glucosidase, Zea Mays-Malate dehydrogenase, Zea Mays Thioredoxin M-type US Patent Application Publication 2012/0304336).

[0130] The genes encoding polypeptides of the disclosure to be targeted to the chloroplast may be optimized for expression in the chloroplast to account for differences in usage between the plant nucleus and this organelle. In this manner, the nucleic acids of interest may be synthesized using chloroplast-preferred sequences.

[0131] In preparing the expression cassette, the various DNA fragments may be manipulated so as to provide for the DNA sequences in the proper orientation and, as appropriate, in the proper reading frame. Toward this end, adapters or linkers may be employed to join the DNA fragments or other manipulations may be involved to provide for convenient restriction sites, removal of superfluous DNA, removal of restriction sites or the like. For this purpose, in vitro mutagenesis, primer repair, restriction, annealing, resubstitutions, e.g., transitions and transversions, may be involved.

[0132] Many promoters can be used in the practice of the embodiments. The promoters can be selected based on the desired outcome. The nucleic acids can be combined with constitutive, tissue-preferred, inducible or other promoters for expression in the host organism. Suitable constitutive promoters for use in a plant host cell include, for example, the core promoter of the Rsyn7 promoter and other constitutive promoters disclosed in WO 1999/43838 and U.S. Pat. No. 6,072,050; the core CaMV 35S promoter (Odell, et al., (1985) Nature 313:810-812); rice actin (McElroy, et al., (1990) Plant Cell 2:163-171); ubiquitin (Christensen, et al., (1989) Plant Mol. Biol. 12:619-632 and Christensen, et al., (1992) Plant Mol. Biol. 18:675-689); pEMU (Last, et al., (1991) Theor. Appl. Genet. 81:581-588); MAS (Velten, et al., (1984) EMBO J. 3:2723-2730); ALS promoter (U.S. Pat. No. 5,659,026) and the like. Other constitutive promoters include, for example, those discussed in U.S. Pat. Nos. 5,608,149; 5,608,144; 5,604,121; 5,569,597; 5,466,785; 5,399,680; 5,268,463; 5,608,142 and 6,177,611.

[0133] Depending on the desired outcome, it may be beneficial to express the gene from an inducible promoter. Of particular interest for regulating the expression of the nucleotide sequences of the embodiments in plants are wound-inducible promoters. Such wound-inducible promoters, may respond to damage caused by insect feeding, and include potato proteinase inhibitor (pin II) gene (Ryan, (1990) Ann. Rev. Phytopath. 28:425-449; Duan, et al., (1996) Nature Biotechnology 14:494-498); wun1 and wun2, U.S. Pat. No. 5,428,148; win1 and win2 (Stanford, et al., (1989) Mol. Gen. Genet. 215:200-208); systemin (McGuri, et al., (1992) Science 225:1570-1573); WIP1 (Rohmeier, et al., (1993) Plant Mol. Biol. 22:783-792; Eckelkamp, et al., (1993) FEBS Letters 323:73-76); MPI gene (Corderok, et al., (1994) Plant J. 6(2):141-150) and the like, herein incorporated by reference.

[0134] Additionally, pathogen-inducible promoters may be employed in the methods and nucleotide constructs of the embodiments. Such pathogen-inducible promoters include those from pathogenesis-related proteins (PR proteins), which are induced following infection by a pathogen; e.g., PR proteins, SAR proteins, beta-1,3-glucanase, chitinase, etc. See, for example, Redolfi, et al., (1983) Neth. J. Plant Pathol. 89:245-254; Uknes, et al., (1992) Plant Cell 4: 645-656 and Van Loon, (1985) Plant Mol. Virol. 4:111-116. See also, WO 1999/43819, herein incorporated by reference.

[0135] Of interest are promoters that are expressed locally at or near the site of pathogen infection. See, for example, Marineau, et al., (1987) Plant Mol. Biol. 9:335-342; Matton, et al., (1989) MolecularPlant-Microbe Interactions 2:325-331; Somsisch, et al., (1986) Proc. Natl. Acad. Sci. USA 83:2427-2430; Somsisch, et al., (1988) Mol. Gen. Genet. 2:93-98 and Yang, (1996) Proc. Natl. Acad. Sci. USA 93:14972-14977. See also, Chen, et al., (1996) Plant J. 10:955-966; Zhang, et al., (1994) Proc. Natl. Acad. Sci. USA 91:2507-2511; Warner, et al., (1993) Plant J. 3:191-201; Siebertz, et al., (1989) Plant Cell 1:961-968; U.S. Pat. No. 5,750,386 (nematode-inducible) and the references cited therein. Of particular interest is the inducible promoter for the maize PRms gene, whose expression is induced by the pathogen Fusarium moniliforme (see, for example, Cordero, et al., (1992) Physiol. Mol. Plant Path. 41:189-200).

[0136] Chemical-regulated promoters can be used to modulate the expression of a gene in a plant through the application of an exogenous chemical regulator. Depending upon the objective, the promoter may be a chemical-inducible promoter, where application of the chemical induces gene expression or a chemical-repressible promoter, where application of the chemical represses gene expression. Chemical-inducible promoters include, but are not limited to, the maize In2-2 promoter, which is activated by benzenesulfonamide herbicide safeners, the maize GST promoter, which is activated by hydrophobic electrophilic compounds that are used as pre-emergent herbicides, and the tobacco PR-1a promoter, which is activated by salicylic acid. Other chemical-regulated promoters of interest include steroid-responsive promoters (see, for example, the glucocorticoid-inducible promoter in Schena, et al, (1991) Proc. Natl. Acad. Sci. USA 88:10421-10425 and McNellis, et al., (1998) Plant J. 14(2):247-257) and tetracycline-inducible and tetracycline-repressible promoters (see, for example, Gatz, et al., (1991) Mol. Gen. Genet. 227:229-237 and U.S. Pat. Nos. 5,814,618 and 5,789,156), herein incorporated by reference.

[0137] Tissue-preferred promoters can be utilized to target enhanced polypeptide expression within a particular plant tissue. Tissue-preferred promoters include those discussed in Yamamoto, et al., (1997) Plant J. 12(2)255-265; Kawamata, et al., (1997) Plant Cell Physiol. 38(7):792-803; Hansen, et al., (1997) Mol. Gen Genet. 254(3):337-343; Russell, et al., (1997) Transgenic Res. 6(2):157-168; Rinehart, et al., (1996) Plant Physiol. 112(3):1331-1341; Van Camp, et al., (1996) Plant Physiol. 112(2):525-535; Canevascini, et al., (1996) Plant Physiol. 112(2):513-524; Yamamoto, et al., (1994) Plant Cell Physiol. 35(5):773-778; Lam, (1994) Results Probl. Cell Differ. 20:181-196; Orozco, et al., (1993) Plant Mol Biol. 23(6):1129-1138; Matsuoka, et al., (1993) Proc Natl. Acad. Sci. USA 90(20):9586-9590 and Guevara-Garcia, et al., (1993) Plant J. 4(3):495-505. Such promoters can be modified, if necessary, for weak expression.

[0138] Leaf-preferred promoters include, for example, Yamamoto, et al, (1997) Plant J. 12(2):255-265; Kwon, et al., (1994) Plant Physiol. 105:357-67; Yamamoto, et al., (1994) Plant Cell Physiol. 35(5):773-778; Gotor, et al., (1993) Plant J. 3:509-18; Orozco, et al., (1993) Plant Mol. Biol. 23(6):1129-1138 and Matsuoka, et al., (1993) Proc. Natl. Acad. Sci. USA 90(20):9586-9590.

[0139] Root-preferred or root-specific promoters are known and can be selected from the many available from the literature or isolated de novo from various compatible species. See, for example, Hire, et al., (1992) Plant Mol. Biol. 20(2):207-218 (soybean root-specific glutamine synthetase gene); Keller and Baumgartner, (1991) Plant Cell 3(10):1051-1061 (root-specific control element in the GRP 1.8 gene of French bean); Sanger, et al., (1990) Plant Mol. Biol. 14(3):433-443 (root-specific promoter of the mannopine synthase (MAS) gene of Agrobacterium tumefaciens) and Miao, et al., (1991) Plant Cell 3(1):11-22 (full-length cDNA clone encoding cytosolic glutamine synthetase (GS), which is expressed in roots and root nodules of soybean). See also, Bogusz, et al., (1990) Plant Cell 2(7):633-641, where two root-specific promoters isolated from hemoglobin genes from the nitrogen-fixing nonlegume Parasponia andersonii and the related non-nitrogen-fixing nonlegume Trema tomentosa are described. The promoters of these genes were linked to a β-glucuronidase reporter gene and introduced into both the nonlegume Nicotiana tabacum and the legume Lotus corniculatus, and in both instances root-specific promoter activity was preserved. Leach and Aoyagi, (1991) describe their analysis of the promoters of the highly expressed roIC and roID root-inducing genes of Agrobacterium rhizogenes (see, Plant Science (Limerick) 79(1):69-76). They concluded that enhancer and tissue-preferred DNA determinants are dissociated in those promoters. Teeri, et al., (1989) used gene fusion to lacZ to show that the Agrobacterium T-DNA gene encoding octopine synthase is especially active in the epidermis of the root tip and that the TR2′ gene is root specific in the intact plant and stimulated by wounding in leaf tissue, an especially desirable combination of characteristics for use with an insecticidal or larvicidal gene (see, EMBO J. 8(2):343-350). The TR1′ gene fused to nptII (neomycin phosphotransferase II) showed similar characteristics. Additional root-preferred promoters include the VfENOD-GRP3 gene promoter (Kuster, et al., (1995) Plant Mol. Biol. 29(4):759-772) and rolB promoter (Capana, et al., (1994) Plant Mol. Biol. 25(4):681-691. See also, U.S. Pat. Nos. 5,837,876; 5,750,386; 5,633,363; 5,459,252; 5,401,836; 5,110,732 and 5,023,179. Arabidopsis thaliana root-preferred regulatory sequences are disclosed in US20130117883.

[0140] “Seed-preferred” promoters include both “seed-specific” promoters (those promoters active during seed development such as promoters of seed storage proteins) as well as “seed-germinating” promoters (those promoters active during seed germination). See, Thompson, et al., (1989) BioEssays 10:108, herein incorporated by reference. Such seed-preferred promoters include, but are not limited to, Cim1 (cytokinin-induced message); cZ19B1 (maize 19 kDa zein); and milps (myo-inositol-1-phosphate synthase) (see, U.S. Pat. No. 6,225,529, herein incorporated by reference). Gamma-zein and Glb-1 are endosperm-specific promoters. For dicots, seed-specific promoters include, but are not limited to, Kunitz trypsin inhibitor 3 (KTi3) (Jofuku and Goldberg, (1989) Plant Cell 1:1079-1093), bean β-phaseolin, napin, β-conglycinin, glycinin 1, soybean lectin, cruciferin, and the like. For monocots, seed-specific promoters include, but are not limited to, maize 15 kDa zein, 22 kDa zein, 27 kDa zein, g-zein, waxy, shrunken 1, shrunken 2, globulin 1, etc. See also, WO 2000/12733, where seed-preferred promoters from end1 and end2 genes are disclosed; herein incorporated by reference. In dicots, seed specific promoters include but are not limited to seed coat promoter from Arabidopsis, pBAN; and the early seed promoters from Arabidopsis, p26, p63, and p63tr (U.S. Pat. Nos. 7,294,760 and 7,847,153). A promoter that has “preferred” expression in a particular tissue is expressed in that tissue to a greater degree than in at least one other plant tissue. Some tissue-preferred promoters show expression almost exclusively in the particular tissue.

[0141] Where low level expression is desired, weak promoters will be used. Generally, the term “weak promoter” as used herein refers to a promoter that drives expression of a coding sequence at a low level. By low level expression at levels of between about 1/1000 transcripts to about 1/100,000 transcripts to about 1/500,000 transcripts is intended. Alternatively, it is recognized that the term “weak promoters” also encompasses promoters that drive expression in only a few cells and not in others to give a total low level of expression. Where a promoter drives expression at unacceptably high levels, portions of the promoter sequence can be deleted or modified to decrease expression levels.

[0142] Such weak constitutive promoters include, for example the core promoter of the Rsyn7 promoter (WO 1999/43838 and U.S. Pat. No. 6,072,050), the core 35S CaMV promoter, and the like. Other constitutive promoters include, for example, those disclosed in U.S. Pat. Nos. 5,608,149; 5,608,144; 5,604,121; 5,569,597; 5,466,785; 5,399,680; 5,268,463; 5,608,142 and 6,177,611, herein incorporated by reference.

[0143] The above list of promoters is not meant to be limiting. Any appropriate promoter can be used in the embodiments.

[0144] Generally, the expression cassette will comprise a selectable marker gene for the selection of transformed cells. Selectable marker genes are utilized for the selection of transformed cells or tissues. Marker genes include genes encoding antibiotic resistance, such as those encoding neomycin phosphotransferase II (NEO) and hygromycin phosphotransferase (HPT), as well as genes conferring resistance to herbicidal compounds, such as glufosinate ammonium, bromoxynil, imidazolinones and 2,4-dichkorophenoxyacetate (2,4-D). Additional examples of suitable selectable marker genes include, but are not limited to, genes encoding resistance to chloramphenicol (Herrera Estrella, et al., (1983) EMBO J. 2:987-992); methotrexate (Herrera Estrella, et al., (1983) Nature 303:209-213 and Meijer, et al., (1991) Plant Mol. Biol. 16:807-820); streptomycin (Jones, et al., (1987) Mol. Gen. Genet. 210:86-91); spectinomycin (Bretagne-Sagnard, et al., (1996) Transgenic Res. 5:131-137); bleomycin (Hille, et al., (1990) Plant Mol. Biol. 7:171-176); sulfonamide (Guerineau, et al., (1990) Plant Mol. Biol. 15:127-136); bromoxynil (Stalker, et al., (1988) Science 242:419-423); glyphosate (Shaw, et al., (1986) Science 233:478-481 and U.S. patent application Ser. Nos. 10/004,357 and 10/427,692); phosphinothricin (DeBlock, et al., (1987) EMBO J. 6:2513-2518). See generally, Yarranton, (1992) Curr. Opin. Biotech. 3:506-511; Christopherson, et al., (1992) Proc. Nat. Acad. Sci. USA 89:6314-6318; Yao, et al., (1992) Cell 71:63-72; Reznikoff, (1992) Md. Microbiol. 6:2419-2422; Barkley, et al., (1980) in The Operon, pp. 177-220; Hu, et al., (1987) Cell 48:555-566; Brown, et al., (1987) Cell 49:603-612; Figge, et al., (1988) Cell 52:713-722; Deuschle, et al., (1989) Proc. Nad. Acad. Sci. USA 86:5400-5404; Fuerst, et al., (1989) Proc. Natl. Acad. Sci. USA 86:2549-2553; Deuschle, et al., (1990) Science 248:480-483; Gossen, (1993) Ph.D. Thesis, University of Heidelberg; Reines, et al., (1993) Proc. Natl. Acad. Sci. USA 90:1917-1921; Labow, et al., (1990) Mol. Cell. Biol. 10:3343-3356; Zambretti, et al., (1992) Proc. Natl. Acad. Sci. USA 89:3952-3956; Baim, et al., (1991) Proc. Natl. Acad. Sci. USA 88:5072-5076; Wyborski, et al., (1991) Nucleic Acids Res. 19:4647-4653; Hillenand-Wissman, (1989) Topics Mol. Struc. Biol. 10:143-162; Degenkolb, et al., (1991) Antimicrob. Agents Chemother. 35:1591-1595; Kleinschnidt, et al., (1988) Biochemistry 27:1094-1104; Bonin, (1993) Ph.D. Thesis, University of Heidelberg; Gossen, et al., (1992) Proc. Nad. Acad. Sci. USA 89:5547-5551; Oliva, et al., (1992) Antimicrob. Agents Chemother. 36:913-919; Hlavka, et al., (1985) Handbook of Experimental Pharmacology, Vol. 78 (Springer-Verag, Berlin) and Gill, et al., (1988) Nature 334:721-724. Such disclosures are herein incorporated by reference.

[0145] The above list of selectable marker genes is not meant to be limiting. Any selectable marker gene can be used in the embodiments.

### Plant Transformation

[0146] The methods of the embodiments involve introducing a polypeptide or polynucleotide into a plant “Introducing” is as used herein means presenting to the plant the polynucleotide or polypeptide in such a manner that the sequence gains access to the interior of a cell of the plant. The methods of the embodiments do not depend on a particular method for introducing a polynucleotide or polypeptide into a plant, only that the polynucleotide or polypeptides gains access to the interior of at least one cell of the plant. Methods for introducing polynucleotide or polypeptides into plants include, but not limited to, stable transformation methods, transient transformation methods, and virus-mediated methods.

[0147] “Stable transformation” is as used herein means that the nucleotide construct introduced into a plant integrates into the genome of the plant and is capable of being inherited by the progeny thereof. “Transient transformation” as used herein means that a polynucleotide is introduced into the plant and does not integrate into the genome of the plant or a polypeptide is introduced into a plant. “Plant” as used herein refers to whole plants, plant organs (e.g., leaves, stems, roots, etc.), seeds, plant cells, propagules, embryos and progeny of the same. Plant cells can be differentiated or undifferentiated (e.g. callus, suspension culture cells, protoplasts, leaf cells, root cells, phloem cells and pollen).

[0148] Transformation protocols as well as protocols for introducing nucleotide sequences into plants may vary depending on the type of plant or plant cell, i.e., monocot or dicot, targeted for transformation. Suitable methods of introducing nucleotide sequences into plant cells and subsequent insertion into the plant genome include microinjection (Crossway, et al., (1986) Biotechniques 4:320-334), electroporation (Riggs, et al., (1986) Proc. Natl. Acad. Sci. USA 83:5602-5606), Agrobacterium-mediated transformation (U.S. Pat. Nos. 5,563,055 and 5,981,840), direct gene transfer (Paszkowski, et al., (1984) EMBO J. 3:2717-2722) and ballistic particle acceleration (see, for example, U.S. Pat. Nos. 4,945,050; 5,879,918; 5,886,244 and 5,932,782; Tomes, et al., (1995) in Plant Cell, Tissue, and Organ Culture: Fundamental Methods, ed. Gamborg and Phillips, (Springer-Verlag, Berlin) and McCabe, et al., (1988) Biotechnology 6:923-926) and Lecl transformation (WO 00/28058). For potato transformation see, Tu, et al., (1998) Plant Molecular Biology 37:829-838 and Chong, et al., (2000) Transgenic Research 9:71-78. Additional transformation procedures can be found in Weissinger, et al., (1988) Ann. Rev. Genet. 22:421-477; Sanford, et al., (1987) Particulate Science and Technology 5:27-37 (onion); Christou, et al., (1988) Plant Physiol. 87:671-674 (soybean); McCabe, et al., (1988) Bio/Technology 6:923-926 (soybean); Finer and McMullen, (1991) In Vitro Cell Dev. Biol. 27P:175-182 (soybean); Singh, et al., (1998) Theor. Appl. Genet. 96:319-324 (soybean); Datta, et al., (1990) Biotechnology 8:736-740 (rice); Klein, et al., (1988) Proc. Natl. Acad. Sci. USA 85:4305-4309 (maize); Klein, et al., (1988) Biotechnology 6:559-563 (maize); U.S. Pat. Nos. 5,240,855; 5,322,783 and 5,324,646; Klein, et al., (1988) Plant Physiol. 91:440-444 (maize); Fromm, et al., (1990) Biotechnology 8:833-839 (maize); Hooykaas-Van Slogteren, et al., (1984) Nature (London) 311:763-764; U.S. Pat. No. 5,736,369 (cereals); Bytebier, et al., (1987) Proc. Natl. Acad. Sci. USA 84:5345-5349 (Uliaceae); De Wet, et al., (1985) in The Experimental Manipulation of Ovule Tissues, ed. Chapman, et al., (Longman, N.Y.), pp. 197-209 (pollen); Kaeppler, et al., (1990) Plant Cell Reports 9:415-418 and Kaeppler, et al., (1992) Theor. Appl. Genet. 84:560-566 (whisker-mediated transformation); D'Halluin, et al., (1992) Plant Cell 4:1495-1505 (electroporation); U, et al., (1993) Plant Cell Reports 12:250-255 and Christou and Ford, (1995) Annals of Botany 75:407-413 (rice); Osjoda, et al., (1996) Nature Biotechnology 14:745-750 (maize via Agrobacterium tumefaciens); all of which are herein incorporated by reference.

[0149] In specific embodiments, the sequences of the embodiments can be provided to a plant using a variety of transient transformation methods. Such transient transformation methods include, but are not limited to, the introduction of the polynucleotide or variants and fragments thereof directly into the plant or the introduction of the polypeptide transcript into the plant. Such methods include, for example, microinjection or particle bombardment. See, for example, Crossway, et al., (1986) Mol Gen. Genet. 202:179-185; Nomura, et al., (1986) Plant Sci. 44:53-58; Hepler, et al., (1994) Proc. Natl. Acad. Sci. 91:2176-2180 and Hush, et al., (1994) The Journal of Cell Science 107:775-784, all of which are herein incorporated by reference. Alternatively, the polynucleotide can be transiently transformed into the plant using techniques including viral vector system and the precipitation of the polynucleotide in a manner that precludes subsequent release of the DNA. Thus, transcription from the particle-bound DNA can occur, but the frequency with which it is released to become integrated into the genome is greatly reduced. Such methods include the use of particles coated with polyethylimine (PEI; Sigma #P3143).

[0150] Methods are known in the art for the targeted insertion of a polynucleotide at a specific location in the plant genome. In one embodiment, the insertion of the polynucleotide at a desired genomic location is achieved using a site-specific recombination system. See, for example, WO 1999/25821, WO 1999/25854, WO 1999/25840, WO 1999/25855 and WO 1999/25853, all of which are herein incorporated by reference. Briefly, the polynucleotide of the embodiments can be contained in transfer cassette flanked by two non-identical recombination sites. The transfer cassette is introduced into a plant have stably incorporated into its genome a target site which is flanked by two non-identical recombination sites that correspond to the sites of the transfer cassette. An appropriate recombinase is provided and the transfer cassette is integrated at the target site. The polynucleotide of interest is thereby integrated at a specific chromosomal position in the plant genome.

[0151] Plant transformation vectors may be comprised of one or more DNA vectors comprised of more than one contiguous DNA segment needed for achieving plant transformation. These vectors are often referred to as “binary vectors”. Binary vectors as well as vectors with helper plasmids are most often used for Agrobacterium-mediated transformation, where the size and complexity of DNA segments needed to achieve efficient transformation is quite large, and it is advantageous to separate functions onto separate DNA molecules. Binary vectors typically contain a plasmid vector that contains the cis-acting sequences required for T-DNA transfer (such as left border and right border), a selectable marker that is engineered to be capable of expression in a plant cell, and a “gene of interest” (a gene engineered to be capable of expression in a plant cell for which generation of transgenic plants is desired). Also present on this plasmid vector are sequences required for bacterial replication. The cis-acting sequences are arranged in a fashion to allow efficient transfer into plant cells and expression therein. For example, the selectable marker gene and the pesticidal gene are located between the left and right borders. Often a second plasmid vector contains the trans-acting factors that mediate T-DNA transfer from Agrobacterium to plant cells. This plasmid often contains the virulence functions (Vir genes) that allow infection of plant cells by Agrobacterium, and transfer of DNA by cleavage at border sequences and vir-mediated DNA transfer (Hellens and Mullineaux, (2000) Trends in Plant Science 5:446-451). Several types of Agrobacterium strains (e.g. LBA4404, GV3101, EHA101, EHA105, etc.) can be used for plant transformation. The second plasmid vector is not necessary for transforming the plants by other methods such as microprojection, microinjection, electroporation, polyethylene glycol, etc.

[0152] In general, plant transformation methods involve transferring heterologous DNA into target plant cells (e.g., immature or mature embryos, suspension cultures, undifferentiated callus, protoplasts, etc.), followed by applying a maximum threshold level of appropriate selection (depending on the selectable marker gene) to recover the transformed plant cells from a group of untransformed cell mass. Following integration of heterologous foreign DNA into plant cells, one then applies a maximum threshold level of appropriate selection in the medium to kill the untransformed cells and separate and proliferate the putatively transformed cells that survive from this selection treatment by transferring regularly to a fresh medium. By continuous passage and challenge with appropriate selection, one can identify and proliferate the cells that are transformed with the plasmid vector. Molecular and biochemical methods can then be used to confirm the presence of the integrated heterologous gene of interest into the genome of the transgenic plant.

[0153] Explants are typically transferred to a fresh supply of the same medium and cultured routinely. Subsequently, the transformed cells are differentiated into shoots after placing on regeneration medium supplemented with a maximum threshold level of selecting agent. The shoots are then transferred to a selective rooting medium for recovering rooted shoot or plantlet. The transgenic plantlet then grows into a mature plant and produces fertile seeds (e.g., Hiei, et al., (1994) The Plant Journal 6:271-282; Ishida, et al., (1996) Nature Biotechnology 14:745-750). Explants are typically transferred to a fresh supply of the same medium and cultured routinely. A general description of the techniques and methods for generating transgenic plants are found in Ayres and Park, (1994) Critical Reviews in Plant Science 13:219-239 and Bommineni and Jauhar, (1997) Maydica 42:107-120. Since the transformed material contains many cells; both transformed and non-transformed cells are present in any piece of subjected target callus or tissue or group of cells. The ability to kill non-transformed cells and allow transformed cells to proliferate results in transformed plant cultures. Often, the ability to remove non-transformed cells is a limitation to rapid recovery of transformed plant cells and successful generation of transgenic plants.

[0154] The cells that have been transformed may be grown into plants in accordance with conventional ways. See, for example, McCormick, et al., (1986) Plant Cell Reports 5:81-84. These plants may then be grown, and either pollinated with the same transformed strain or different strains, and the resulting hybrid having constitutive or inducible expression of the desired phenotypic characteristic identified. Two or more generations may be grown to ensure that expression of the desired phenotypic characteristic is stably maintained and inherited and then seeds harvested to ensure that expression of the desired phenotypic characteristic has been achieved.

[0155] The nucleotide sequences of the embodiments may be provided to the plant by contacting the plant with a virus or viral nucleic acids. Generally, such methods involve incorporating the nucleotide construct of interest within a viral DNA or RNA molecule. It is recognized that the recombinant proteins of the embodiments may be initially synthesized as part of a viral polyprotein, which later may be processed by proteolysis in vivo or in vitro to produce the desired polypeptide. It is also recognized that such a viral polyprotein, comprising at least a portion of the amino acid sequence of a polypeptide of the embodiments, may have the desired pesticidal activity. Such viral polyproteins and the nucleotide sequences that encode for them are encompassed by the embodiments. Methods for providing plants with nucleotide constructs and producing the encoded proteins in the plants, which involve viral DNA or RNA molecules, in, for example, U.S. Pat. Nos. 5,889,191; 5,889,190; 5,866,785; 5,589,367 and 5,316,931; herein incorporated by reference.

[0156] Methods for transformation of chloroplasts include, for example, Svab, et al., (1990) Proc. Natl. Acad. Sci. USA 87:8526-8530; Svab and Maliga, (1993) Proc. Natl. Acad. Sci. USA 90:913-917; Svab and Maliga, (1993) EMBO J. 12:601-606. The method relies on particle gun delivery of DNA containing a selectable marker and targeting of the DNA to the plastid genome through homologous recombination. Additionally, plastid transformation can be accomplished by transactivation of a silent plastid-borne transgene by tissue-preferred expression of a nuclear-encoded and plastid-directed RNA polymerase. Such a system has been reported in McBride, et al., (1994) Proc. Natl. Acad. Sci. USA 91:7301-7305.

[0157] The embodiments further relate to plant-propagating material of a transformed plant of the embodiments including, but not limited to, seeds, tubers, corms, bulbs, leaves and cuttings of roots and shoots.

[0158] The embodiments may be used for transformation of any plant species, including, but not limited to, monocots and dicots. Examples of plants of interest include, but are not limited to, corn (Zea mays), Brassica sp. (e.g., B. napus, B. rapa, B. juncea), particularly those Brassica species useful as sources of seed oil, alfalfa (Medicago sativa), rice (Oryza sativa), rye (Secale cereale), sorghum (Sorghum bicolor, Sorghum vulgare), millet (e.g., pearl millet (Pennisetum glaucum), proso millet (Panicum miliaceum), foxtail millet (Setaria italica), finger millet (Eleusine coracana)), sunflower (Helianthus annuus), safflower (Carthamus tinctorus), wheat (Triticum aestivum), soybean (Glycine max), tobacco (Nicotiana tabacum), potato (Solanum tuberosum), peanuts (Arachis hypogaea), cotton (Gossypium barbadense, Gossypium hirsutum), sweet potato (Ipomoea batatus), cassava (Manihot esculenta), coffee (Coffea spp.), coconut (Cocos nucifera), pineapple (Ananas comosus), citrus trees (Citrus spp.), cocoa (Theobroma cacao), tea (Camellia sinensis), banana (Musa spp.), avocado (Persea americana), fig (Ficus casica), guava (Psidium guajava), mango (Mangifera indica), olive (Olea europaea), papaya (Carica papaya), cashew (Anacardium occidentale), macadamia (Macadamia integrifolia), almond (Prunus amygdalus), sugar beets (Beta vulgaris), sugarcane (Saccharum spp.), oats, barley, vegetables ornamentals, and conifers.

[0159] Vegetables include tomatoes (Lycopersicon esculentum), lettuce (e.g., Lactuca sativa), green beans (Phaseolus vulgaris), lima beans (Phaseolus limensis), peas (Lathyrus spp.), and members of the genus Cucumis such as cucumber (C. sativus), cantaloupe (C. cantalupensis), and musk melon (C. melo). Ornamentals include azalea (Rhododendron spp.), hydrangea (Macrophylla hydrangea), hibiscus (Hibiscus rosasanensis), roses (Rosa spp.), tulips (Tulipa spp.), daffodils (Narcissus spp.), petunias (Petunia hybrida), carnation (Dianthus caryophyllus), poinsettia (Euphorbia pulcherrima), and chrysanthemum. Conifers that may be employed in practicing the embodiments include, for example, pines such as loblolly pine (Pinus taeda), slash pine (Pinus elliotii), ponderosa pine (Pinus ponderosa), lodgepole pine (Pinus contorta), and Monterey pine (Pinus radiata); Douglas-fir (Pseudotsuga menziesii); Western hemlock (Tsuga canadensis); Sitka spruce (Picea glauca); redwood (Sequoia sempervirens); true firs such as silver fir (Abies amabilis) and balsam fir (Abies balsamea); and cedars such as Western red cedar (Thuja plicata) and Alaska yellow-cedar (Chamaecyparis nootkatensis). Plants of the embodiments include crop plants (for example, corn, alfalfa, sunflower, Brassica, soybean, cotton, safflower, peanut, sorghum, wheat, millet, tobacco, etc.), such as corn and soybean plants.

[0160] Turf grasses include, but are not limited to: annual bluegrass (Poa annua); annual ryegrass (Lolium multiflorum); Canada bluegrass (Poa compressa); Chewing's fescue (Festuca rubra); colonial bentgrass (Agrostis tenuis); creeping bentgrass (Agrostis palustis); crested wheatgrass (Agropyron desertorum); fairway wheatgrass (Agropyron cristatum); hard fescue (Festuca longifolia); Kentucky bluegrass (Poa pratensis); orchard grass (Dactylis glomerata); perennial ryegrass (Lolium perenne); red fescue (Festuca rubra); redtop (Agrostis alba); rough bluegrass (Poa trivialis); sheep fescue (Festuca ovina); smooth bromegrass (Bromus inermis); tall fescue (Festuca arundinacea); timothy (Phleum pratense); velvet bentgrass (Agrostis canina); weeping alkaligrass (Puccinellia distans); western wheatgrass (Agropyron smithii); Bermuda grass (Cynodon spp.); St. Augustine grass (Stenotaphrum secundatum); zoysia grass (Zoysia spp.); Bahia grass (Paspalum notatum); carpet grass (Axonopus affinis); centipede grass (Eremochloa ophiuroides); kikuyu grass (Pennisetum clandesinum); seashore paspalum (Paspalum vaginatum); blue gramma (Bouteloua gracilis); buffalo grass (Buchloe dactyloids); sideoats gramma (Bouteloua curtipendula).

[0161] Plants of interest include grain plants that provide seeds of interest, oil-seed plants, and leguminous plants. Seeds of interest include grain seeds, such as con, wheat, barley, rice, sorghum, rye, millet, etc. Oil-seed plants include cotton, soybean, safflower, sunflower, Brassica, maize, alfalfa, palm, coconut, flax, castor, olive, etc. Leguminous plants include beans and peas. Beans include guar, locust bean, fenugreek, soybean, garden beans, cowpea, mung bean, lima bean, fava bean, lentils, chickpea, etc.

### Evaluation of Plant Transformation

[0162] Following introduction of heterologous foreign DNA into plant cells, the transformation or integration of heterologous gene in the plant genome is confirmed by various methods such as analysis of nucleic acids, proteins and metabolites associated with the integrated gene.

[0163] PCR analysis is a rapid method to screen transformed cells, tissue or shoots for the presence of incorporated gene at the earlier stage before transplanting into the soil (Sambrook and Russell, (2001) Molecular Cloning: A Laboratory Manual. Cold Spring Harbor Laboratory Press, Cold Spring Harbor, N.Y.). PCR is carried out using oligonucleotide primers specific to the gene of interest or Agrobacterium vector background, etc.

[0164] Plant transformation may be confirmed by Southern blot analysis of genomic DNA (Sambrook and Russell, (2001) supra). In general, total DNA is extracted from the transformant, digested with appropriate restriction enzymes, fractionated in an agarose gel and transferred to a nitrocellulose or nylon membrane. The membrane or “blot” is then probed with, for example, radiolabeled 32P target DNA fragment to confirm the integration of introduced gene into the plant genome according to standard techniques (Sambrook and Russell, (2001) supra).

[0165] In Northern blot analysis, RNA is isolated from specific tissues of transformant, fractionated in a formaldehyde agarose gel, and blotted onto a nylon filter (Sambrook and Russell, (2001) supra). Expression of RNA encoded by the pesticidal gene is then tested by hybridizing the filter to a radioactive probe derived from a pesticidal gene (Sambrook and Russell, (2001) supra).

[0166] Western blot, biochemical assays and the like may be carried out on the transgenic plants to confirm the presence of protein encoded by the pesticidal gene by standard procedures (Sambrook and Russell, 2001, supra) using antibodies that bind to one or more epitopes present on the polypeptide.

Methods to Introduce Genome Editing Technologies into Plants

[0167] In some embodiments, the disclosed polynucleotide compositions can be introduced into the genome of a plant using genome editing technologies, or previously introduced polynucleotides in the genome of a plant may be edited using genome editing technologies. For example, the disclosed polynucleotides can be introduced into a desired location in the genome of a plant through the use of double-stranded break technologies such as TALENs, meganucleases, zinc finger nucleases, CRISPR-Cas, and the like. For example, the disclosed polynucleotides can be introduced into a desired location in a genome using a CRISPR-Cas system, for the purpose of site-specific insertion. The desired location in a plant genome can be any desired target site for insertion, such as a genomic region amenable for breeding or may be a target site located in a genomic window with an existing trait of interest. Existing traits of interest could be either an endogenous trait or a previously introduced trait.

[0168] In some embodiments, where the disclosed polynucleotide has previously been introduced into a genome, genome editing technologies may be used to alter or modify the introduced polynucleotide sequence. Site specific modifications that can be introduced into the disclosed polynucleotide compositions include those produced using any method for introducing site specific modification, including, but not limited to, through the use of gene repair oligonucleotides (e.g. US Publication 2013/0019349), or through the use of double-stranded break technologies such as TALENs, meganucleases, zinc finger nucleases, CRISPR-Cas, and the like. Such technologies can be used to modify the previously introduced polynucleotide through the insertion, deletion or substitution of nucleotides within the introduced polynucleotide. Alternatively, double-stranded break technologies can be used to add additional nucleotide sequences to the introduced polynucleotide. Additional sequences that may be added include, additional expression elements, such as enhancer and promoter sequences. In another embodiment, genome editing technologies may be used to position additional insecticidally-active proteins in close proximity to the disclosed polynucleotide compositions disclosed herein within the genome of a plant, in order to generate molecular stacks or breeding stacks of insecticidally-active proteins.

[0169] An “altered target site,” “altered target sequence.” “modified target site,” and “modified target sequence” are used interchangeably herein and refer to a target sequence as disclosed herein that comprises at least one alteration when compared to non-altered target sequence. Such “alterations” include, for example: (i) replacement of at least one nucleotide, (ii) a deletion of at least one nucleotide, (iii) an insertion of at least one nucleotide, or (iv) any combination of (i)-(iii).

### Stacking of Traits in Transgenic Plant

[0170] Transgenic plants may comprise a stack of one or more insecticidal polynucleotides disclosed herein with one or more additional polynucleotides resulting in the production or suppression of multiple polypeptide sequences. Transgenic plants comprising stacks of polynucleotide sequences can be obtained by either or both of traditional breeding methods or through genetic engineering methods. These methods include, but are not limited to, breeding individual lines each comprising a polynucleotide of interest, transforming a transgenic plant comprising a gene disclosed herein with a subsequent gene and co-transformation of genes into a single plant cell. As used herein, the term “stacked” includes having the multiple traits present in the same plant (i.e., both traits are incorporated into the nuclear genome, one trait is incorporated into the nuclear genome and one trait is incorporated into the genome of a plastid or both traits are incorporated into the genome of a plastid). In one non-limiting example, “stacked traits” comprise a molecular stack or breeding stack where the sequences are physically adjacent to each other. A trait, as used herein, refers to the phenotype derived from a particular sequence or groups of sequences. Co-transformation of genes can be carried out using single transformation vectors comprising multiple genes or genes carried separately on multiple vectors. If the sequences are stacked by genetically transforming the plants, the polynucleotide sequences of interest can be combined at any time and in any order. The traits can be introduced simultaneously in a co-transformation protocol with the polynucleotides of interest provided by any combination of transformation cassettes. For example, if two sequences will be introduced, the two sequences can be contained in separate transformation cassettes (trans) or contained on the same transformation cassette (cis). Expression of the sequences can be driven by the same promoter or by different promoters. In certain cases, it may be desirable to introduce a transformation cassette that will suppress the expression of the polynucleotide of interest. This may be combined with any combination of other suppression cassettes or overexpression cassettes to generate the desired combination of traits in the plant. It is further recognized that polynucleotide sequences can be stacked at a desired genomic location using a site-specific recombination system. See, for example, WO 1999/25821, WO 1999/25854, WO 1999/25840, WO 1999/25855 and WO 1999/25853, all of which are herein incorporated by reference.

[0171] In some embodiments, provided are transgenic plants comprising a molecular stack comprising: a polynucleotide encoding an IPD103 polypeptide having insecticidal activity; and one or more polynucleotides selected from: a polynucleotide encoding a PtlP-83 polypeptide having insecticidal activity; a polynucleotide encoding a Cry1B polypeptide having insecticidal activity; a polynucleotide encoding a variant Cry1B polypeptide having insecticidal activity; a polynucleotide encoding a Cry1C polypeptide having insecticidal activity; a polynucleotide encoding a Cry1D polypeptide having insecticidal activity and a polynucleotide encoding a Cry1J polypeptide having insecticidal activity.

[0172] In some embodiments, the molecular stack provides insecticidal activity against Heliothine and/or Spodoptera pest species. In some embodiments, the Heliothine and/or Spodoptera pest is selected from velvetbean caterpillar (VBC) Anticarsia gemmatalis, soybean looper (SBL) Pseudoplusia includens, corn earworm (CEW) Heliothis zea, tobacco budworm (TBW) Heliothis virescens, cotton bolworm (CBW) Helicoverpa zea, fall armyworm (FAW) Spodoptera frugiperda, and southern armyworm (SAW) Spodoptera eridania.

[0173] In some embodiments, the molecular stack comprises a polynucleotide disclosed in PCT WO 2018/005411, which is incorporated herein by reference), encoding an IPD103 polypeptide having insecticidal activity.

[0174] In some embodiments, the molecular stack comprises a polynucleotide encoding an IPD103 polypeptide having at least 95% identity to SEQ ID NO: 2, SEQ ID NO: 4, SEQ ID NO: 6, SEQ ID NO: 8, SEQ ID NO: 10, SEQ ID NO: 12, SEQ ID NO: 14, SEQ ID NO: 16, SEQ ID NO: 18, SEQ ID NO: 20, SEQ ID NO: 22, SEQ ID NO: 24, SEQ ID NO: 26, SEQ ID NO: 28, SEQ ID NO: 30, SEQ ID NO: 32, SEQ ID NO: 34, SEQ ID NO: 36 or SEQ ID NO: 38.

[0175] In some embodiments, the molecular stack comprises a polynucleotide encoding an IPD103 polypeptide of SEQ ID NO: 2, SEQ ID NO: 4, SEQ ID NO: 6, SEQ ID NO: 8, SEQ ID NO: 10, SEQ ID NO: 12, SEQ ID NO: 14, SEQ ID NO: 16, SEQ ID NO: 18, SEQ ID NO: 20, SEQ ID NO: 22, SEQ ID NO: 24, SEQ ID NO: 26, SEQ ID NO: 28, SEQ ID NO: 30, SEQ ID NO: 32, SEQ ID NO: 34, SEQ ID NO: 36 or SEQ ID NO: 38.

[0176] In some embodiments, the molecular stack comprises a PtlP-83 polynucleotide disclosed in US Publication US 21060347799 encoding a PtlP-83 polypeptide having insecticidal activity.

[0177] In some embodiments, the molecular stack comprises a PtlP-83 polynucleotide encoding a PtlP-83 polypeptide having at least about 40%, 45%, 50%, 51%, 52%, 53%, 54%, 55%, 56%, 57%, 58%, 59%, 60%, 61%, 62%, 63%, 64%, 65%, 66%, 67%, 68%, 69%, 70%, 71%, 72%, 73%, 74%, 75%, 76%, 77%, 78%, 79%, 80%, 81%, 82%, 83%, 84%, 85%, 86%, 87%, 88%, 89%, 90%, 91%, 92%, 93%, 94%, 95%, 96%, 97%, 98%, 99% or greater sequence identity compared to SEQ ID NO: 39, SEQ ID NO: 41, SEQ ID NO: 43, SEQ ID NO: 45, SEQ ID NO: 47, SEQ ID NO: 49, SEQ ID NO: 51, SEQ ID NO: 53, SEQ ID NO: 55, SEQ ID NO: 57, SEQ ID NO: 59 or SEQ ID NO: 61.

[0178] In some embodiments, the molecular stack comprises a PtlP-83 polynucleotide encoding a PtlP-83 polypeptide comprising an amino acid sequence having at least 95% sequence identity to an amino acid sequence of SEQ ID NO: 39, SEQ ID NO: 41, SEQ ID NO: 43, SEQ ID NO: 45, SEQ ID NO: 47, SEQ ID NO: 49, SEQ ID NO: 51, SEQ ID NO: 53, SEQ ID NO: 55, SEQ ID NO: 57, SEQ ID NO: 59 or SEQ ID NO: 61.

[0179] In some embodiments, the molecular stack comprises a PtlP-83 polynucleotide encoding a PtlP-83 polypeptide comprising the amino acid sequence of SEQ ID NO: 39, SEQ ID NO: 41, SEQ ID NO: 43, SEQ ID NO: 45, SEQ ID NO: 47, SEQ ID NO: 49, SEQ ID NO: 51, SEQ ID NO: 53, SEQ ID NO: 55, SEQ ID NO: 57, SEQ ID NO: 59 or SEQ ID NO: 61.

[0180] In some embodiments, the molecular stack comprises a polynucleotides encode a Cry1B polypeptide selected from Cry1Ba1 (Accession CAA29898, Cry1Ba2 (Accession CAA65003), Cry1Ba3 (Accession AAK63251), Cry1Ba4 (Accession AAK51084, Cry1Ba5 (Accession AB020894), Cry1Ba6 (Accession ABL60921), Cry1Ba7 (Accession HQ439781), Cry1Bb1 (AAA22344), Cry1Bb2 (Accession HQ439782), Cry1Bc1 (Accession CAA86568), Cry1Bd1 (Accession AAD10292), Cry1Bd2 (Accession AAM93496), Cry1Be1 (Accession AAC32850), Cry1Be2 (Accession AAQ52387), Cry1Be3 (Accession ACV96720), Cry1Be4 (Accession HM070026), Cry1Bf1 (Accession CAC50778), Cry1Bf2 (Accession AAQ52380), Cry1Bg1 (Accession AA039720), Cry1Bh1 (Accession HQ589331), and Cry1Bi1 (Accession KC156700).

[0181] In some embodiments, the molecular stack comprises a polynucleotide encoding a Cry1B polypeptide selected from a Cry1B of U.S. Pat. Nos. 8,772,577, 9,404,121, US Publication US 20160194364, and U.S. Ser. No. 62/607,372, which are incorporated herein by reference.

[0182] In some embodiments, the molecular stack comprises a polynucleotide encoding a Cry1B polypeptide selected from the amino acid sequence of SEQ ID NO: 63, SEQ ID NO: 109, SEQ ID NO: 111, SEQ ID NO: 221, SEQ ID NO: 223, SEQ ID NO: 224, SEQ ID NO: 225, SEQ ID NO: 226, SEQ ID NO: 227, SEQ ID NO: 228, and SEQ ID NO: 229.

[0183] In some embodiments, the molecular stack comprises a polynucleotide encoding a variant Cry1B polypeptide of US Publication US 20170226164 and WO Publication WO2017/180715, which are incorporated herein by reference.

[0184] In some embodiments, the molecular stack comprises a polynucleotide encoding a variant Cry1B polypeptide comprising the amino acid sequence of SEQ ID NO: 65, SEQ ID NO: 67, SEQ ID NO: 69, SEQ ID NO: 71, SEQ ID NO: 73, SEQ ID NO: 75, SEQ ID NO: 77, SEQ ID NO: 79, SEQ ID NO: 81, SEQ ID NO: 83, SEQ ID NO: 84, SEQ ID NO: 85, SEQ ID NO: 87, SEQ ID NO: 89, SEQ ID NO: 91, SEQ ID NO: 93, SEQ ID NO: 95, SEQ ID NO: 97, SEQ ID NO: 99, SEQ ID NO: 101, SEQ ID NO: 103, SEQ ID NO: 105, SEQ ID NO: 107, SEQ ID NO: 113, SEQ ID NO: 114, SEQ ID NO: 115, SEQ ID NO: 116, SEQ ID NO: 117, SEQ ID NO: 118, SEQ ID NO: 119, SEQ ID NO: 120, SEQ ID NO: 121, SEQ ID NO: 122, SEQ ID NO: 123, SEQ ID NO: 124, SEQ ID NO:125, SEQ ID NO:126, SEQ ID NO: 127, SEQ ID NO: 128, SEQ ID NO: 129, SEQ ID NO: 130, SEQ ID NO: 131, SEQ ID NO: 132, SEQ ID NO: 133, SEQ ID NO: 134, SEQ ID NO: 135, SEQ ID NO: 136, SEQ ID NO: 137, SEQ ID NO: 138, SEQ ID NO: 139, SEQ ID NO: 140, SEQ ID NO: 141, SEQ ID NO: 142, SEQ ID NO: 143, SEQ ID NO: 144, SEQ ID NO: 145, SEQ ID NO: 146, SEQ ID NO: 147, SEQ ID NO: 148, SEQ ID NO: 149, SEQ ID NO: 150, SEQ ID NO: 151, SEQ ID NO: 152, SEQ ID NO: 153, SEQ ID NO: 154, SEQ ID NO: 155, SEQ ID NO: 156, SEQ ID NO: 157, SEQ ID NO: 158, SEQ ID NO: 159, SEQ ID NO: 160, SEQ ID NO: 161, SEQ ID NO: 162, SEQ ID NO: 163, SEQ ID NO: 164, SEQ ID NO: 165, SEQ ID NO: 166, SEQ ID NO: 167, SEQ ID NO: 168, SEQ ID NO: 169, SEQ ID NO: 170, SEQ ID NO: 171, SEQ ID NO: 172, SEQ ID NO: 173, SEQ ID NO: 174, SEQ ID NO: 175, SEQ ID NO: 176, SEQ ID NO: 177, SEQ ID NO: 178, SEQ ID NO: 179, SEQ ID NO: 180, SEQ ID NO: 181, SEQ ID NO: 182, SEQ ID NO: 183, SEQ ID NO: 184, SEQ ID NO: 185, SEQ ID NO: 186, SEQ ID NO: 187, SEQ ID NO: 188, SEQ ID NO: 189, SEQ ID NO: 190, SEQ ID NO: 191, SEQ ID NO: 191, SEQ ID NO: 192, SEQ ID NO: 193, SEQ ID NO: 194, SEQ ID NO: 195, SEQ ID NO: 196, SEQ ID NO: 197, SEQ ID NO: 198, SEQ ID NO: 199, SEQ ID NO: 200, SEQ ID NO: 201, SEQ ID NO: 202, SEQ ID NO: 203, SEQ ID NO: 204, SEQ ID NO: 205, SEQ ID NO: 206, SEQ ID NO: 207, SEQ ID NO: 208, SEQ ID NO: 209, SEQ ID NO: 210 or SEQ ID NO: 211.

[0185] In some embodiments, the molecular stack comprises a polynucleotide encoding a variant Cry1B polypeptide selected from SEQ ID NO: 65, SEQ ID NO: 67, SEQ ID NO: 69, SEQ ID NO: 71, SEQ ID NO: 73, SEQ ID NO: 75, SEQ ID NO: 77, SEQ ID NO: 79, SEQ ID NO: 81, SEQ ID NO: 83, SEQ ID NO: 84, SEQ ID NO: 85, SEQ ID NO: 87, SEQ ID NO: 89, SEQ ID NO: 91, SEQ ID NO: 93, SEQ ID NO: 95, SEQ ID NO: 97, SEQ ID NO: 99, SEQ ID NO: 101, SEQ ID NO: 103, SEQ ID NO: 105, SEQ ID NO: 107, SEQ ID NO: 113, SEQ ID NO: 114, SEQ ID NO: 115, SEQ ID NO: 116, SEQ ID NO: 117, SEQ ID NO: 118, SEQ ID NO: 119, SEQ ID NO: 120, SEQ ID NO: 121, SEQ ID NO: 122, SEQ ID NO: 123, SEQ ID NO: 124, SEQ ID NO: 125, SEQ ID NO: 126, SEQ ID NO: 127, SEQ ID NO: 128, SEQ ID NO: 129, SEQ ID NO: 130, SEQ ID NO: 131, SEQ ID NO: 132, SEQ ID NO: 133, SEQ ID NO: 134, SEQ ID NO: 135, SEQ ID NO: 136, SEQ ID NO: 137, SEQ ID NO: 138, SEQ ID NO: 139, SEQ ID NO: 140, SEQ ID NO: 141, SEQ ID NO: 142, SEQ ID NO: 143, SEQ ID NO: 144, SEQ ID NO: 145, SEQ ID NO: 146, SEQ ID NO: 147, SEQ ID NO: 148, SEQ ID NO: 149, SEQ ID NO: 150, SEQ ID NO: 151, SEQ ID NO: 152, SEQ ID NO: 153, SEQ ID NO: 154, SEQ ID NO: 155, SEQ ID NO: 156, SEQ ID NO: 157, SEQ ID NO: 158, SEQ ID NO: 159, SEQ ID NO: 160, SEQ ID NO: 161, SEQ ID NO: 162, SEQ ID NO: 163, SEQ ID NO: 164, SEQ ID NO: 165, SEQ ID NO: 166, SEQ ID NO: 167, SEQ ID NO: 168, SEQ ID NO: 169, SEQ ID NO: 170, SEQ ID NO: 171, SEQ ID NO: 172, SEQ ID NO: 173, SEQ ID NO: 174, SEQ ID NO: 175, SEQ ID NO: 176, SEQ ID NO: 177, SEQ ID NO: 178, SEQ ID NO: 179, SEQ ID NO: 180, SEQ ID NO: 181, SEQ ID NO: 182, SEQ ID NO: 183, SEQ ID NO: 184, SEQ ID NO: 185, SEQ ID NO: 186, SEQ ID NO: 187, SEQ ID NO: 188, SEQ ID NO: 189, SEQ ID NO: 190, SEQ ID NO: 191, SEQ ID NO: 191, SEQ ID NO: 192, SEQ ID NO: 193, SEQ ID NO: 194, SEQ ID NO: 195, SEQ ID NO: 196, SEQ ID NO: 197, SEQ ID NO: 198, SEQ ID NO: 199, SEQ ID NO: 200, SEQ ID NO: 201, SEQ ID NO: 202, SEQ ID NO: 203, SEQ ID NO: 204, SEQ ID NO: 205, SEQ ID NO: 206, SEQ ID NO: 207, SEQ ID NO: 208, SEQ ID NO: 209, SEQ ID NO: 210, and SEQ ID NO: 211.

[0186] In some embodiments, the molecular stack comprises a polynucleotide encoding a Cry1C polypeptide selected from Cry1Ca1 (Accession CAA30396), Cry1Ca2 (Accession CAA31951), Cry1Ca3 (Accession AAA22343), Cry1Ca4 (Accession CAA01886), Cry1Ca5 (Accession CAA65457), Cry1Ca6 (Accession AAF37224), Cry1Ca7 (Accession AAG50438), Cry1Ca8 (Accession AAM00264), Cry1Ca9 (Accession AAL79362), Cry1Ca10 (Accession AAN16462), Cry1Ca11 (Accession AAX53094), Cry1Ca12 (Accession HM070027), Cry1Ca13 (Accession HQ412621), Cry1Ca14 (Accession JN651493), Cry1Cb1 (Accession M97880), Cry1Cb2 (Accession AAG35409), Cry1Cb3 (Accession ACD50894), Cry1Cb-like (Accession AAX63901), Cry1Da1 (Accession CAA38099), Cry1Da2 (Accession 176415), and Cry1Da3 (Accession HQ43978).

[0187] In some embodiments, the Cry1C polypeptide comprises an amino acid sequence having at least 95% sequence identity to a Cry1Ca polypeptide.

[0188] In some embodiments, the Cry1C polypeptide comprises the amino acid sequence of a Cry1Ca polypeptide.

[0189] In some embodiments, the molecular stack comprises a polynucleotide encoding a Cry1D polypeptide selected from Cry1Da1 (Accession CAA38099), Cry1Da2 (Accession 176415), Cry1Da3 (Accession HQ439784), Cry1Db1 (Accession CAA80234), Cry1Db2 (Accession AAK48937), and Cry1Dc1 (Accession ABK35074).

[0190] In some embodiments, the Cry1D polypeptide comprises an amino acid sequence having at least 95% sequence identity to a Cry1Da polypeptide.

[0191] In some embodiments, the Cry1D polypeptide comprises the amino acid sequence of a Cry1Da polypeptide.

[0192] In some embodiments, the molecular stack comprises a polynucleotide encoding a Cry1J polypeptide selected from Cry1Ja1 (Accession AAA22341), Cry1Ja2 (Accession HM070030), Cry1Ja3 (Accession JQ228425), Cry1Jb1 (Accession AAA98959), Cry1Jc1 (Accession AAC31092), Cry1Jc2 (Accession AAQ52372), and Cry1Jd1 (Accession CAC50779).

[0193] In some embodiments, the molecular stack comprises a polynucleotide encoding a variant Cry1J polypeptide of US Publication Number US20170240603.

[0194] In some embodiments, the molecular stack comprises a polynucleotide encoding a Cry1J variant polypeptide comprising an amino acid sequence having at least 95% identity to SEQ ID NO: 213, SEQ ID NO: 215, SEQ ID NO: 217 or SEQ ID NO: 219.

[0195] In some embodiments, the molecular stack comprises a polynucleotide encoding a Cry1J variant polypeptide comprising the amino acid sequence of SEQ ID NO: 213, SEQ ID NO: 215, SEQ ID NO:217 or SEQ ID NO:219.

[0196] In some embodiments, the molecular stack comprises a polynucleotide encoding a variant Cry1J polypeptide selected from SEQ ID NO: 213, SEQ ID NO: 215, SEQ ID NO: 217 or SEQ ID NO: 219.

[0197] In some embodiments, provided are transgenic plants comprising a breeding stack comprising: a polynucleotide encoding an IPD103 polypeptide having insecticidal activity; and one or more polynucleotides selected from: a polynucleotide encoding a PtlP-83 polypeptide having insecticidal activity; a polynucleotide encoding a Cry1B polypeptide having insecticidal activity; a polynucleotide encoding a variant Cry1B polypeptide having insecticidal activity; a polynucleotide encoding a Cry1C polypeptide having insecticidal activity; a polynucleotide encoding a Cry1D polypeptide having insecticidal activity and a polynucleotide encoding a Cry1J polypeptide having insecticidal activity.

[0198] In some embodiments, the breeding stack provides insecticidal activity against Heliothine and/or Spodoptera pests species. In some embodiments, the Heliothine and/or Spodoptera pests are selected from velvetbean caterpillar (VBC) Anticarsia gemmatalis, soybean looper (SBL) Pseudoplusia includens, corn earworm (CEW) Heliothis zea, tobacco budworm (TBW) Heliothis virescens, cotton bollworm (CBW) Helicoverpa zea, fall armyworm (FAW) Spodopter frugiperda, and southern armyworm (SAW) Spodoptera eridania.

[0199] In some embodiments, the breeding stack comprises a polynucleotide disclosed in PCT WO 2018/005411, which is incorporated herein by reference, encoding an IPD103 polypeptide having insecticidal activity.

[0200] In some embodiments, the breeding stack comprises a polynucleotide encoding an IPD103 polypeptide having at least 95% identity to SEQ ID NO: 2, SEQ ID NO: 4, SEQ ID NO: 6, SEQ ID NO: 8, SEQ ID NO: 10, SEQ ID NO: 12, SEQ ID NO: 14, SEQ ID NO: 16, SEQ ID NO: 18, SEQ ID NO: 20, SEQ ID NO: 22, SEQ ID NO: 24, SEQ ID NO: 26, SEQ ID NO: 28, SEQ ID NO: 30, SEQ ID NO: 32, SEQ ID NO: 34, SEQ ID NO: 36 or SEQ ID NO: 38.

[0201] In some embodiments, the breeding stack comprises a polynucleotide encoding an IPD103 polypeptide of SEQ ID NO: 2, SEQ ID NO: 4, SEQ ID NO: 6, SEQ ID NO: 8, SEQ ID NO: 10, SEQ ID NO: 12, SEQ ID NO: 14, SEQ ID NO: 16, SEQ ID NO: 18, SEQ ID NO: 20, SEQ ID NO: 22, SEQ ID NO: 24, SEQ ID NO: 26, SEQ ID NO: 28, SEQ ID NO: 30, SEQ ID NO: 32, SEQ ID NO: 34, SEQ ID NO: 36 or SEQ ID NO: 38.

[0202] In some embodiments, the breeding stack comprises a PtlP-83 polynucleotide disclosed in US Publication US 21060347799 encoding a PtlP-83 polypeptide having insecticidal activity.

[0203] In some embodiments, the breeding stack comprises a PtlP-83 polynucleotide encoding a PtlP-83 polypeptide having at least about 40%, 45%, 50%, 51%, 52%, 53%, 54%, 55%, 56%, 57%, 58%, 59%, 60%, 61%, 62%, 63%, 64%, 65%, 66%, 67%, 68%, 69%, 70%, 71%, 72%, 73%, 74%, 75%, 76%, 77%, 78%, 79%, 80%, 81%, 82%, 83%, 84%, 85%, 86%, 87%, 88%, 89%, 90%, 91%, 92%, 93%, 94%, 95%, 96%, 97%, 98%, 99% or greater sequence identity compared to SEQ ID NO: 39, SEQ ID NO: 41, SEQ ID NO: 43, SEQ ID NO: 45, SEQ ID NO: 47, SEQ ID NO: 49, SEQ ID NO: 51, SEQ ID NO: 53, SEQ ID NO: 55, SEQ ID NO: 57, SEQ ID NO: 59 or SEQ ID NO: 61.

[0204] In some embodiments, the breeding stack comprises a PtlP-83 polynucleotide encoding a PtlP-83 polypeptide comprising an amino acid sequence having at least 95% sequence identity to an amino acid sequence of SEQ ID NO: 39, SEQ ID NO: 41, SEQ ID NO: 43, SEQ ID NO: 45, SEQ ID NO: 47, SEQ ID NO: 49, SEQ ID NO: 51, SEQ ID NO: 53, SEQ ID NO: 55, SEQ ID NO: 57, SEQ ID NO: 59 or SEQ ID NO: 61.

[0205] In some embodiments, the breeding stack comprises a PtlP-83 polynucleotide encoding a PtlP-83 polypeptide comprising the amino acid sequence of SEQ ID NO: 39, SEQ ID NO: 41, SEQ ID NO: 43, SEQ ID NO: 45, SEQ ID NO: 47, SEQ ID NO: 49, SEQ ID NO: 51, SEQ ID NO: 53, SEQ ID NO: 55, SEQ ID NO: 57, SEQ ID NO: 59 or SEQ ID NO: 61.

[0206] In some embodiments, the breeding stack comprises a polynucleotides encode a Cry1B polypeptide selected from Cry1Ba1 (Accession CAA29898, Cry1Ba2 (Accession CAA65003), Cry1Ba3 (Accession AAK63251), Cry1Ba4 (Accession AAK51084, Cry1Ba5 (Accession AB020894), Cry1Ba6 (Accession ABL60921), Cry1Ba7 (Accession HQ439781), Cry1Bb1 (AAA22344), Cry1Bb2 (Accession HQ439782), Cry1Bc1 (Accession CAA86568), Cry1Bd1 (Accession AAD10292), Cry1Bd2 (Accession AAM93496), Cry1Be1 (Accession AAC32850), Cry1Be2 (Accession AAQ52387), Cry1Be3 (Accession ACV96720), Cry1Be4 (Accession HM070026), Cry1Bf1 (Accession CAC50778), Cry1Bf2 (Accession AAQ52380), Cry1Bg1 (Accession AA039720), Cry1Bh1 (Accession HQ589331), and Cry1Bi1 (Accession KC156700).

[0207] In some embodiments, the breeding stack comprises a polynucleotide encoding a Cry1B polypeptide selected from a Cry1B of U.S. Pat. Nos. 8,772,577, 9,404,121, US Publication US 20160194364, and U.S. Ser. No. 62/607,372, which are incorporated herein by reference.

[0208] In some embodiments, the breeding stack comprises a polynucleotide encoding a Cry1B polypeptide selected from the amino acid sequence of SEQ ID NO: 63, SEQ ID NO: 109, SEQ ID NO: 111, SEQ ID NO: 221, SEQ ID NO: 223, SEQ ID NO: 224, SEQ ID NO: 225, SEQ ID NO: 226, SEQ ID NO: 227, SEQ ID NO: 228, and SEQ ID NO: 229.

[0209] In some embodiments, the breeding stack comprises a polynucleotide encoding a variant Cry1B polypeptide of US Publication US 20170226164 and WO Publication WO2017/180715, which are incorporated herein by reference.

[0210] In some embodiments, the breeding stack comprises a polynucleotide encoding a variant Cry1B polypeptide comprising the amino acid sequence of SEQ ID NO: 65, SEQ ID NO: 67, SEQ ID NO: 69, SEQ ID NO: 71, SEQ ID NO: 73, SEQ ID NO: 75, SEQ ID NO: 77, SEQ ID NO: 79, SEQ ID NO: 81, SEQ ID NO: 83, SEQ ID NO: 84, SEQ ID NO: 85, SEQ ID NO: 87, SEQ ID NO: 89, SEQ ID NO: 91, SEQ ID NO: 93, SEQ ID NO: 95, SEQ ID NO: 97, SEQ ID NO: 99, SEQ ID NO: 101, SEQ ID NO: 103, SEQ ID NO: 105, SEQ ID NO: 107, SEQ ID NO: 113, SEQ ID NO: 114, SEQ ID NO: 115, SEQ ID NO: 116, SEQ ID NO: 117, SEQ ID NO: 118, SEQ ID NO: 119, SEQ ID NO: 120, SEQ ID NO: 121, SEQ ID NO: 122, SEQ ID NO: 123, SEQ ID NO: 124, SEQ ID NO: 125, SEQ ID NO: 126, SEQ ID NO: 127, SEQ ID NO: 128, SEQ ID NO: 129, SEQ ID NO: 130, SEQ ID NO: 131, SEQ ID NO: 132, SEQ ID NO: 133, SEQ ID NO: 134, SEQ ID NO: 135, SEQ ID NO: 136, SEQ ID NO: 137, SEQ ID NO: 138, SEQ ID NO: 139, SEQ ID NO: 140, SEQ ID NO:141, SEQ ID NO:142, SEQ ID NO:143, SEQ ID NO:144, SEQ ID NO: 145, SEQ ID NO: 146, SEQ ID NO: 147, SEQ ID NO: 148, SEQ ID NO: 149, SEQ ID NO: 150, SEQ ID NO: 151, SEQ ID NO: 152, SEQ ID NO: 153, SEQ ID NO: 154, SEQ ID NO: 155, SEQ ID NO: 156, SEQ ID NO: 157, SEQ ID NO: 158, SEQ ID NO: 159, SEQ ID NO: 160, SEQ ID NO: 161, SEQ ID NO: 162, SEQ ID NO: 163, SEQ ID NO: 164, SEQ ID NO: 165, SEQ ID NO: 166, SEQ ID NO: 167, SEQ ID NO: 168, SEQ ID NO: 169, SEQ ID NO: 170, SEQ ID NO: 171, SEQ ID NO: 172, SEQ ID NO: 173, SEQ ID NO: 174, SEQ ID NO: 175, SEQ ID NO: 176, SEQ ID NO: 177, SEQ ID NO: 178, SEQ ID NO: 179, SEQ ID NO: 180, SEQ ID NO: 181, SEQ ID NO: 182, SEQ ID NO: 183, SEQ ID NO: 184, SEQ ID NO: 185, SEQ ID NO: 186, SEQ ID NO: 187, SEQ ID NO: 188, SEQ ID NO: 189, SEQ ID NO: 190, SEQ ID NO: 191, SEQ ID NO: 191, SEQ ID NO: 192, SEQ ID NO: 193, SEQ ID NO: 194, SEQ ID NO: 195, SEQ ID NO: 196, SEQ ID NO: 197, SEQ ID NO: 198, SEQ ID NO: 199, SEQ ID NO: 200, SEQ ID NO: 201, SEQ ID NO: 202, SEQ ID NO: 203, SEQ ID NO: 204, SEQ ID NO: 205, SEQ ID NO: 206, SEQ ID NO: 207, SEQ ID NO: 208, SEQ ID NO: 209, SEQ ID NO: 210 or SEQ ID NO: 211.

[0211] In some embodiments, the breeding stack comprises a polynucleotide encoding a variant Cry1B polypeptide selected from SEQ ID NO: 65, SEQ ID NO: 67, SEQ ID NO: 69, SEQ ID NO: 71, SEQ ID NO: 73, SEQ ID NO: 75, SEQ ID NO: 77, SEQ ID NO: 79, SEQ ID NO: 81, SEQ ID NO: 83, SEQ ID NO: 84, SEQ ID NO: 85, SEQ ID NO: 87, SEQ ID NO: 89, SEQ ID NO: 91, SEQ ID NO: 93, SEQ ID NO: 95, SEQ ID NO: 97, SEQ ID NO: 99, SEQ ID NO: 101, SEQ ID NO: 103, SEQ ID NO: 105, SEQ ID NO: 107, SEQ ID NO: 113, SEQ ID NO: 114, SEQ ID NO: 115, SEQ ID NO: 116, SEQ ID NO: 117, SEQ ID NO: 118, SEQ ID NO: 119, SEQ ID NO: 120, SEQ ID NO: 121, SEQ ID NO: 122, SEQ ID NO: 123, SEQ ID NO: 124, SEQ ID NO: 125, SEQ ID NO: 126, SEQ ID NO: 127, SEQ ID NO: 128, SEQ ID NO: 129, SEQ ID NO: 130, SEQ ID NO: 131, SEQ ID NO: 132, SEQ ID NO: 133, SEQ ID NO: 134, SEQ ID NO: 135, SEQ ID NO: 136, SEQ ID NO: 137, SEQ ID NO: 138, SEQ ID NO: 139, SEQ ID NO: 140, SEQ ID NO: 141, SEQ ID NO: 142, SEQ ID NO: 143, SEQ ID NO: 144, SEQ ID NO: 145, SEQ ID NO: 146, SEQ ID NO: 147, SEQ ID NO: 148, SEQ ID NO: 149, SEQ ID NO: 150, SEQ ID NO: 151, SEQ ID NO: 152, SEQ ID NO: 153, SEQ ID NO: 154, SEQ ID NO: 155, SEQ ID NO: 156, SEQ ID NO: 157, SEQ ID NO: 158, SEQ ID NO: 159, SEQ ID NO: 160, SEQ ID NO: 161, SEQ ID NO: 162, SEQ ID NO: 163, SEQ ID NO: 164, SEQ ID NO: 165, SEQ ID NO: 166, SEQ ID NO: 167, SEQ ID NO: 168, SEQ ID NO: 169, SEQ ID NO: 170, SEQ ID NO: 171, SEQ ID NO: 172, SEQ ID NO: 173, SEQ ID NO: 174, SEQ ID NO: 175, SEQ ID NO: 176, SEQ ID NO: 177, SEQ ID NO: 178, SEQ ID NO: 179, SEQ ID NO: 180, SEQ ID NO: 181, SEQ ID NO: 182, SEQ ID NO: 183, SEQ ID NO: 184, SEQ ID NO: 185, SEQ ID NO: 186, SEQ ID NO: 187, SEQ ID NO: 188, SEQ ID NO: 189, SEQ ID NO: 190, SEQ ID NO: 191, SEQ ID NO: 191, SEQ ID NO: 192, SEQ ID NO: 193, SEQ ID NO: 194, SEQ ID NO: 195, SEQ ID NO: 196, SEQ ID NO: 197, SEQ ID NO: 198, SEQ ID NO: 199, SEQ ID NO: 200, SEQ ID NO: 201, SEQ ID NO: 202, SEQ ID NO: 203, SEQ ID NO: 204, SEQ ID NO: 205, SEQ ID NO: 206, SEQ ID NO: 207, SEQ ID NO: 208, SEQ ID NO: 209, SEQ ID NO: 210, and SEQ ID NO: 211.

[0212] In some embodiments, the breeding stack comprises a polynucleotide encoding a Cry1C polypeptide selected from Cry1Ca1 (Accession CAA30396), Cry1Ca2 (Accession CAA31951), Cry1Ca3 (Accession AAA22343), Cry1Ca4 (Accession CAA01886), Cry1Ca5 (Accession CAA65457), Cry1Ca6 (Accession AAF37224), Cry1Ca7 (Accession AAG50438), Cry1Ca8 (Accession AAM00264), Cry1Ca9 (Accession AAL79362), Cry1Ca10 (Accession AAN16462), Cry1Ca11 (Accession AAX53094), Cry1Ca12 (Accession HM070027), Cry1Ca13 (Accession HQ412621), Cry1Ca14 (Accession JN651493), Cry1Cb1 (Accession M97880), Cry1Cb2 (Accession AAG35409), Cry1Cb3 (Accession ACD50894), Cry1Cb-like (Accession AAX63901), Cry1Da1 (Accession CAA38099), Cry1Da2 (Accession 176415), and Cry1Da3 (Accession HQ43978).

[0213] In some embodiments, the Cry1C polypeptide comprises an amino acid sequence having at least 95% sequence identity to a Cry1Ca polypeptide.

[0214] In some embodiments, the Cry1C polypeptide comprises the amino acid sequence of a Cry1Ca polypeptide.

[0215] In some embodiments, the breeding stack comprises a polynucleotide encoding a Cry1D polypeptide selected from Cry1Da1 (Accession CAA38099), Cry1Da2 (Accession 176415), Cry1Da3 (Accession HQ439784), Cry1Db1 (Accession CAA80234), Cry1Db2 (Accession AAK48937), and Cry1Dc1 (Accession ABK35074).

[0216] In some embodiments, the Cry1D polypeptide comprises an amino acid sequence having at least 95% sequence identity to Cry1Da polypeptide.

[0217] In some embodiments, the Cry1D polypeptide comprises the amino acid sequence of a Cry1Da polypeptide.

[0218] In some embodiments, the breeding stack comprises a polynucleotide encoding a Cry1J polypeptide selected from Cry1Ja1 (Accession AAA22341), Cry1Ja2 (Accession HM070030), Cry1Ja3 (Accession JQ228425), Cry1Jb1 (Accession AAA98959), Cry1Jc1 (Accession AAC31092), Cry1Jc2 (Accession AAQ52372), and Cry1Jd1 (Accession CAC50779).

[0219] In some embodiments, the breeding stack comprises a polynucleotide encoding a variant Cry1J polypeptide of US Publication Number US20170240603.

[0220] In some embodiments, the breeding stack comprises a polynucleotide encoding a Cry1J variant polypeptide comprising an amino acid sequence having at least 95% identity to SEQ ID NO: 213, SEQ ID NO: 215, SEQ ID NO: 217 or SEQ ID NO: 219.

[0221] In some embodiments, the breeding stack comprises a polynucleotide encoding a Cry1J variant polypeptide comprising the amino acid sequence of SEQ ID NO: 213, SEQ ID NO: 215, SEQ ID NO: 217 or SEQ ID NO: 219.

[0222] In some embodiments, the breeding stack comprises a polynucleotide encoding a variant Cry1J polypeptide selected from SEQ ID NO: 213, SEQ ID NO: 215, SEQ ID NO: 217 or SEQ ID NO: 219.

[0223] In some embodiments the polynucleotides encoding the IPD103 polypeptide disclosed herein, stacked with one or more additional insect resistance traits can be stacked with one or more additional input traits (e.g., herbicide resistance, fungal resistance, virus resistance, stress tolerance, disease resistance, male sterility, stalk strength, and the like) or output traits (e.g., increased yield, modified starches, improved oil profile, balanced amino acids, high lysine or methionine, increased digestibility, improved fiber quality, drought resistance, and the like). Thus, the polynucleotide embodiments can be used to provide a complete agronomic package of improved crop quality with the ability to flexibly and cost effectively control any number of agronomic pests.

[0224] Transgenes useful for stacking include but are not limited to:

1. Transgenes that Confer Resistance to Insects or Disease and that Encode:

[0225] (A) Plant disease resistance genes. Plant defenses are often activated by specific interaction between the product of a disease resistance gene (R) in the plant and the product of a corresponding avirulence (Avr) gene in the pathogen. A plant variety can be transformed with cloned resistance gene to engineer plants that are resistant to specific pathogen strains. See, for example, Jones, et al., (1994) Science 266:789 (cloning of the tomato Cf-9 gene for resistance to Cladosporium fulvum); Martin, et al, (1993) Science 262:1432 (tomato Pto gene for resistance to Pseudomonas syringae pv. tomato encodes a protein kinase); Mindrinos, et al., (1994) Cell 78:1089 (Arabidopsis RSP2 gene for resistance to Pseudomonas syringae), McDowell and Woffenden, (2003) Trends Biotechnol. 21(4):178-83 and Toyoda, et al., (2002) Transgenic Res. 11(6):567-82. A plant resistant to a disease is one that is more resistant to a pathogen as compared to the wild type plant.

[0226] (B) Genes encoding a Bacillus thuringiensis protein, a derivative thereof or a synthetic polypeptide modeled thereon. See, for example, Geiser, et al., (1986) Gene 48:109, who disclose the cloning and nucleotide sequence of a Bt delta-endotoxin gene. Moreover, DNA molecules encoding delta-endotoxin genes can be purchased from American Type Culture Collection (Rockville, Md.), for example, under ATCC® Accession Numbers 40098, 67136, 31995 and 31998. Other non-limiting examples of Bacillus thuringiensis transgenes being genetically engineered are given in the following patents and patent applications and hereby are incorporated by reference for this purpose: U.S. Pat. Nos. 5,188,960; 5,689,052; 5,880,275; 5,986,177; 6,023,013, 6,060,594, 6,063,597, 6,077,824, 6,620,988, 6,642,030, 6,713,259, 6,893,826, 7,105,332; 7,179,965, 7,208,474; 7,227,056, 7,288,643, 7,323,556, 7,329,736, 7,449,552, 7,468,278, 7,510,878, 7,521,235, 7,544,862, 7,605,304, 7,696,412, 7,629,504, 7,705,216, 7,772,465, 7,790,846, 7,858,849 and WO 1991/14778; WO 1999/31248; WO 2001/12731; WO 1999/24581 and WO 1997/40162.

[0227] Genes encoding pesticidal proteins may also be stacked including but are not limited to: insecticidal proteins from Pseudomonas sp. such as PSEEN3174 (Monalysin, (2011) PLoS Pathogens, 7:1-13), from Pseudomonas protegens strain CHAO and Pf-5 (previously fluorescens) (Pechy-Tarr, (2008) Environmental Microbiology 10:2368-2386: GenBank Accession No. EU400157); from Pseudomonas taiwanensis (Liu, et al., (2010) J. Agric. Food Chem. 58:12343-12349) and from Pseudomonas pseudoacaligenes (Zhang, et al., (2009) Annals of Microbiology 59:45-50 and Li, et al., (2007) Plant Cell Tiss. Organ Cult. 89:159-168); insecticidal proteins from Photorhabdus sp. and Xenorhabdus sp. (Hinchliffe, et al., (2010) The Open Toxinology Journal 3:101-118 and Morgan, et al., (2001) Applied and Envir. Micro. 67:2062-2069), U.S. Pat. Nos. 6,048,838, and 6,379,946; a PIP-1 polypeptide of US Patent Publication US20140007292; an AflP-1A and/or AflP-1B polypeptide of US Patent Publication US20140033361; a PHI-4 polypeptide of US Patent Publication US20140274885 and US20160040184; a PIP-47 polypeptide of PCT Publication Number WO2015/023846, a PIP-72 polypeptide of PCT Publication Number WO2015/038734; a PtlP-50 polypeptide and a PtlP-65 polypeptide of PCT Publication Number WO2015/120270; a PtlP-83 polypeptide of PCT Publication Number WO2015/120276; a PtlP-96 polypeptide of US Publication No. 2017-0233440; an IPD079 polypeptide of US Publication No. 2018-0222947; an IPD082 polypeptide of PCT WO 2017/105987, and 6-endotoxins including, but not limited to, the Cry1, Cry2, Cry3, Cry4, Cry5, Cry6, Cry7, Cry8, Cry9, Cry10, Cry11, Cry12, Cry13, Cry14, Cry15, Cry16, Cry17, Cry18, Cry19, Cry20, Cry21, Cry22, Cry23, Cry24, Cry25, Cry26, Cry27, Cry 28, Cry 29, Cry 30, Cry31, Cry32, Cry33, Cry34, Cry35, Cry36, Cry37, Cry38, Cry39, Cry40, Cry41, Cry42, Cry43, Cry44, Cry45, Cry 46, Cry47, Cry49, Cry50, Cry51, Cry52, Cry53, Cry 54, Cry55, Cry56, Cry57, Cry58, Cry59, Cry60, Cry61, Cry62, Cry63, Cry64, Cry65, Cry66, Cry67, Cry68, Cry69, Cry70, Cry71, and Cry 72 classes of 6-endotoxin genes and the B. thuringiensis cytoytic Cyt1 and Cyt2 genes. Members of these classes of B. thuringiensis insecticidal proteins can be found in Crickmore, et al., “Bacillus thuringiensis toxin nomenclature” (2011), at lifesci.sussex.ac.uk/home/Neil_Crickmore/Bt/which can be accessed on the world-wide web using the “www” prefix).

[0228] Examples of δ-endotoxins also include but are not limited to Cry1A proteins of U.S. Pat. Nos. 5,880,275 and 7,858,849; a DIG-3 or DIG-11 toxin (N-terminal deletion of α-helix 1 and/or α-helix 2 variants of Cry proteins such as Cry1A) of U.S. Pat. Nos. 8,304,604 and 8,304,605, Cry1B of U.S. patent application Ser. No. 10/525,318; Cry1C of U.S. Pat. No. 6,033,874; Cry1F of U.S. Pat. Nos. 5,188,960, 6,218,188; Cry1A/F chimeras of U.S. Pat. Nos. 7,070,982; 6,962,705 and 6,713,063); a Cry2 protein such as Cry2Ab protein of U.S. Pat. No. 7,064,249); a Cry3A protein including but not limited to an engineered hybrid insecticidal protein (eHIP) created by fusing unique combinations of variable regions and conserved blocks of at least two different Cry proteins (US Patent Application Publication Number 2010/0017914); a Cry4 protein; a Cry5 protein; a Cry6 protein; Cry8 proteins of U.S. Pat. Nos. 7,329,736, 7,449,552, 7,803,943, 7,476,781, 7,105,332, 7,378,499 and 7,462,760; a Cry9 protein such as such as members of the Cry9A, Cry9B, Cry9C, Cry9D, Cry9E, and Cry9F families; a Cry15 protein of Naimov, et al., (2008) Applied and Environmental Microbiology 74:7145-7151; a Cry22, a Cry34Ab1 protein of U.S. Pat. Nos. 6,127,180, 6,624,145 and 6,340,593; a CryET33 and CryET34 protein of U.S. Pat. Nos. 6,248,535, 6,326,351, 6,399,330, 6,949,626, 7,385,107 and 7,504,229; a CryET33 and CryET34 homologs of US Patent Publication Number 2006/0191034, 2012/0278954, and PCT Publication Number WO 2012/139004; a Cry35Ab1 protein of U.S. Pat. Nos. 6,083,499, 6,548,291 and 6,340,593; a Cry46 protein, a Cry 51 protein, a Cry binary toxin; a TIC901 or related toxin; TIC807 of US 2008/0295207; ET29, ET37, TIC809, TIC810, TIC812, TIC127, TIC128 of PCT US 2006/033867; AXMI-027, AXMI-036, and AXMI-038 of U.S. Pat. No. 8,236,757; AXMI-031, AXMI-039, AXMI-040, AXMI-049 of U.S. Pat. No. 7,923,602; AXMI-018, AXMI-020, and AXMI-021 of WO 2006/083891; AXMI-010 of WO 2005/038032; AXMI-003 of WO 2005/021585; AXMI-008 of US 2004/0250311; AXMI-006 of US 2004/0216186; AXMI-007 of US 2004/0210965; AXMI-009 of US 2004/0210964; AXMI-014 of US 2004/0197917; AXMI-004 of US 2004/0197916; AXMI-028 and AXMI-029 of WO 2006/119457; AXMI-007, AXMI-008, AXMI-0080rf2, AXMI-009, AXMI-014 and AXMI-004 of WO 2004/074462; AXMI-150 of U.S. Pat. No. 8,084,416; AXMI-205 of US20110023184; AXMI-011, AXMI-012, AXMI-013, AXMI-015, AXMI-019, AXMI-044, AXMI-037, AXMI-043, AXMI-033, AXMI-034, AXMI-022, AXMI-023, AXMI-041, AXMI-063, and AXMI-064 of US 2011/0263488; AXMI-R1 and related proteins of US 2010/0197592; AXMI221Z, AXMI222z, AXMI223z, AXMI224z and AXMI225z of WO 2011/103248; AXMI218, AXMI219, AXMI220, AXMI226, AXMI227, AXMI228, AXMI229, AXMI230, and AXMI231 of WO11/103247; AXMI-115, AXMI-113, AXMI-005, AXMI-163 and AXMI-184 of U.S. Pat. No. 8,334,431; AXMI-001, AXMI-002, AXMI-030, AXMI-035, and AXMI-045 of US 2010/0298211; AXMI-066 and AXMI-076 of US2009/0144852; AXMI128, AXMI130, AXMI131, AXMI133, AXMI140, AXMI141, AXMI142, AXMI143, AXMI144, AXMI146, AXMI148, AXMI149, AXMI152, AXMI153, AXMI154, AXMI155, AXMI156, AXMI157, AXMI158, AXMI162, AXMI165, AXMI166, AXMI167, AXMI168, AXMI169, AXMI170, AXMI171, AXMI172, AXMI173, AXMI174, AXMI175, AXMI176, AXMI177, AXMI178, AXMI179, AXMI180, AXMI181, AXMI182, AXMI185, AXMI186, AXMI187, AXMI188, AXMI189 of U.S. Pat. No. 8,318,900; AXMI079, AXMI080, AXMI081, AXMI082, AXMI091, AXMI092, AXMI096, AXMI097, AXMI098, AXMI099, AXMI100, AXMI101, AXMI102, AXMI103, AXMI104, AXMI107, AXMI108, AXMI109, AXMI110, AXMI111, AXMI112, AXMI114, AXMI116, AXMI117, AXMI118, AXMI19, AXMI120, AXMI21, AXMI122, AXMI23, AXMI24, AXMI257, AXMI268, AXMI127, AXMI129, AXMI164, AXMI151, AXMI161, AXMI183, AXMI132, AXMI138, AXMI137 of US 2010/0005543; and Cry proteins such as Cry1A and Cry3A having modified proteolytic sites of U.S. Pat. No. 8,319,019; and a Cry1Ac, Cry2Aa and Cry1Ca toxin protein from Bacillus thuringiensis strain VBTS 2528 of US Patent Application Publication Number 2011/0064710. Other Cry proteins can be found at Crickmore, et al., “Bacillus thuringiensis toxin nomenclature” (2011), at lifesci.sussex.ac.uk/home/Neil_Crickmore/Bt/which can be accessed on the world-wide web using the “www” prefix). The insecticidal activity of Cry proteins is known to one skilled in the art (for review, see, van Frannkenhuyzen, (2009) J. Invert. Path. 101:1-16). The use of Cry proteins as transgenic plant traits and Cry-transgenic plants including but not limited to Cry1Ac, Cry1Ac+Cry2Ab, Cry1Ab, Cry1A.105, Cry1F, Cry1Fa2, Cry1F+Cry1Ac, Cry2Ab, Cry3A, mCry3A, Cry3Bb1, Cry34Ab1, Cry35Ab1, Vip3A, mCry3A, Cry9c and CBI-Bt have received regulatory approval (see, Sanahuja, (2011) Plant Biotech Journal 9:283-300 and the CERA (2010) GM Crop Database Center for Environmental Risk Assessment (CERA), ILSI Research Foundation, Washington D.C. at cera-gmc.org/ndex.php?action=gm_crop_database which can be accessed on the world-wide web using the “www” prefix). More than one pesticidal proteins can also be expressed in plants such as Vip3Ab & Cry1Fa (US2012/0317682), Cry1BE & Cry1F (US2012/0311746), Cry1CA & Cry1AB (US2012/0311745), Cry1F & CryCa (US2012/0317681), Cry1DA & Cry1BE (US2012/0331590), Cry1DA & Cry1Fa (US2012/0331589), Cry1AB & Cry1BE (US2012/0324606), and Cry1Fa & Cry2Aa, Cry1I or Cry1E (US2012/0324605). Pesticidal proteins also include insecticidal lipases including lipid acyl hydrolases of U.S. Pat. No. 7,491,869, and cholesterol oxidases such as from Streptomyces (Purcell et al. (1993) Biochem Biophys Res Commun 15:1406-1413). Pesticidal proteins also include VIP (vegetative insecticidal proteins) toxins of U.S. Pat. Nos. 5,877,012, 6,107,279, 6,137,033, 7,244,820, 7,615,686, and 8,237,020, and the like. Other VIP proteins can be found at lifesci.sussex.ac.uk/home/Neil_Crickmore/Bt/vip.html which can be accessed on the world-wide web using the “www” prefix). Pesticidal proteins also include toxin complex (TC) proteins, obtainable from organisms such as Xenorhabdus, Photorhabdus and Paenibacillus (see, U.S. Pat. Nos. 7,491,698 and 8,084,418). Some TC proteins have “stand alone” insecticidal activity and other TC proteins enhance the activity of the stand-alone toxins produced by the same given organism. The toxicity of a “stand-alone” TC protein (from Photorhabdus, Xenorhabdus or Paenibacillus, for example) can be enhanced by one or more TC protein “potentiators” derived from a source organism of a different genus. There are three main types of TC proteins. As referred to herein, Class A proteins (“Protein A”) are stand-alone toxins. Class B proteins (“Protein B”) and Class C proteins (“Protein C”) enhance the toxicity of Class A proteins. Examples of Class A proteins are TcbA, TcdA, XptA1 and XptA2. Examples of Class B proteins are TcaC, TcdB, XptB1Xb and XptC1Wi. Examples of Class C proteins are TccC, XptC1Xb and XptB1Wi. Pesticidal proteins also include spider, snake and scorpion venom proteins. Examples of spider venom peptides include but are not limited to lycotoxin-1 peptides and mutants thereof (U.S. Pat. No. 8,334,366).

[0229] (C) A polynucleotide encoding an insect-specific hormone or pheromone such as an ecdysteroid and juvenile hormone, a variant thereof, a mimetic based thereon or an antagonist or agonist thereof. See, for example, the disclosure by Hammock, et al., (1990) Nature 344:458, of baculovirus expression of cloned juvenile hormone esterase, an inactivator of juvenile hormone.

[0230] (D) A polynucleotide encoding an insect-specific peptide which, upon expression, disrupts the physiology of the affected pest. For example, see the disclosures of, Regan, (1994) J. Biol. Chem. 269:9 (expression cloning yields DNA coding for insect diuretic hormone receptor); Pratt, et al., (1989) Biochem. Biophys. Res. Comm. 163:1243 (an allostatin is identified in Diploptera puntata); Chattopadhyay, et al., (2004) Critical Reviews in Microbiology 30(1):33-54; Zjawiony, (2004) J Nat Prod 67(2):300-310; Carlini and Grossi-de-Sa, (2002) Toxicon 40(11):1515-1539; Ussuf, et al., (2001) Cuff Sci. 80(7):847-853 and Vasconcelos and Oliveira, (2004) Toxicon 44(4):385-403. See also, U.S. Pat. No. 5,266,317 to Tomalski, et al., who disclose genes encoding insect-specific toxins.

[0231] (E) A polynucleotide encoding an enzyme responsible for a hyperaccumulation of a monoterpene, a sesquiterpene, a steroid, hydroxamic acid, a phenylpropanoid derivative or another non-protein molecule with insecticidal activity.

[0232] (F) A polynucleotide encoding an enzyme involved in the modification, including the post-translational modification, of a biologically active molecule; for example, a glycolytic enzyme, a proteolytic enzyme, a lipolytic enzyme, a nuclease, a cyclase, a transaminase, an esterase, a hydrolase, a phosphatase, a kinase, a phosphorylase, a polymerase, an elastase, a chitinase and a glucanase, whether natural or synthetic. See, PCT Application WO 1993/02197 in the name of Scott, et al., which discloses the nucleotide sequence of a callase gene. DNA molecules which contain chitinase-encoding sequences can be obtained, for example, from the ATCC® under Accession Numbers 39637 and 67152. See also, Kramer, et al., (1993) Insect Biochem. Molec. Biol. 23:691, who teach the nucleotide sequence of a cDNA encoding tobacco hookworm chitinase and Kawalleck, et al., (1993) Plant Molec. Biol. 21:673, who provide the nucleotide sequence of the parsley ubi4-2 polyubiquitin gene, and U.S. Pat. Nos. 6,563,020; 7,145,060 and 7,087,810.

[0233] (G) A polynucleotide encoding a molecule that stimulates signal transduction. For example, see the disclosure by Botella, et al., (1994) Plant Molec. Biol. 24:757, of nucleotide sequences for mung bean calmodulin cDNA clones, and Griess, et al., (1994) Plant Physiol. 104:1467, who provide the nucleotide sequence of a maize calmodulin cDNA clone.

[0234] (H) A polynucleotide encoding a hydrophobic moment peptide. See, PCT Application WO 1995/16776 and U.S. Pat. No. 5,580,852 disclosure of peptide derivatives of Tachyplesin which inhibit fungal plant pathogens) and PCT Application WO 1995/18855 and U.S. Pat. No. 5,607,914 (teaches synthetic antimicrobial peptides that confer disease resistance).

[0235] (I) A polynucleotide encoding a membrane permease, a channel former or a channel blocker. For example, see the disclosure by Jaynes, et al., (1993) Plant Sci. 89:43, of heterologous expression of a cecropin-beta lytic peptide analog to render transgenic tobacco plants resistant to Pseudomonas solanacearum.

[0236] (J) A gene encoding a viral-invasive protein or a complex toxin derived therefrom. For example, the accumulation of viral coat proteins in transformed plant cells imparts resistance to viral infection and/or disease development effected by the virus from which the coat protein gene is derived, as well as by related viruses. See, Beachy, et al., (1990) Ann. Rev. Phytopathol. 28:451. Coat protein-mediated resistance has been conferred upon transformed plants against alfalfa mosaic virus, cucumber mosaic virus, tobacco streak virus, potato virus X, potato virus Y, tobacco etch virus, tobacco rattle virus and tobacco mosaic virus. Id.

[0237] (K) A gene encoding an insect-specific antibody or an immunotoxin derived therefrom. Thus, an antibody targeted to a critical metabolic function in the insect gut would inactivate an affected enzyme, killing the insect. Cf. Taylor, et al., Abstract #497, SEVENTH INT'L SYMPOSIUM ON MOLECULAR PLANT-MICROBE INTERACTIONS (Edinburgh, Scotland, 1994) (enzymatic inactivation in transgenic tobacco via production of single-chain antibody fragments).

[0238] (L) A gene encoding a virus-specific antibody. See, for example, Tavladoraki, et al., (1993) Nature 366:469, who show that transgenic plants expressing recombinant antibody genes are protected from virus attack.

[0239] (M) A polynucleotide encoding a developmental-arrestive protein produced in nature by a pathogen or a parasite. Thus, fungal endo alpha-1,4-D-polygalacturonases facilitate fungal colonization and plant nutrient release by solubilizing plant cell wall homo-alpha-1,4-D-galacturonase. See, Lamb, et al., (1992) Bio/Technology 10:1436. The cloning and characterization of a gene which encodes a bean endopolygalacturonase-inhibiting protein is described by Toubart, et al., (1992) Plant J. 2:367.

[0240] (N) A polynucleotide encoding a developmental-arrestive protein produced in nature by a plant. For example, Logemann, et al., (1992) Bio/Technology 10:305, have shown that transgenic plants expressing the barley ribosome-inactivating gene have an increased resistance to fungal disease.

[0241] (O) Genes involved in the Systemic Acquired Resistance (SAR) Response and/or the pathogenesis related genes. Briggs, (1995) Current Biology 5(2), Pieterse and Van Loon, (2004) Curr. Opin. Plant Bio. 7(4):456-64 and Somssich, (2003) Cell 113(7):815-6.

[0242] (P) Antifungal genes (Comelissen and Melchers, (1993) P. Physiol. 101:709-712 and Parijs, et al., (1991) Planta 183:258-264 and Bushnell, et al., (1998) Can. J. of Plant Path. 20(2):137-149. Also, see, U.S. patent application Ser. Nos. 09/950,933; 11/619,645; 11/657,710; 11/748,994; 11/774,121 and U.S. Pat. Nos. 6,891,085 and 7,306,946. LysM Receptor-like kinases for the perception of chitin fragments as a first step in plant defense response against fungal pathogens (US 2012/0110696).

[0243] (Q) Detoxification genes, such as for fumonisin, beauvericin, moniliformin and zearalenone and their structurally related derivatives. For example, see, U.S. Pat. Nos. 5,716,820; 5,792,931; 5,798,255; 5,846,812; 6,083,736; 6,538,177; 6,388,171 and 6,812,380.

[0244] (R) A polynucleotide encoding a Cystatin and cysteine proteinase inhibitors. See, U.S. Pat. No. 7,205,453.

[0245] (S) Defensin genes. See, WO 2003/000863 and U.S. Pat. Nos. 6,911,577; 6,855,865; 6,777,592 and 7,238,781.

[0246] (T) Genes conferring resistance to nematodes. See, e.g., PCT Application WO 1996/30517; PCT Application WO 1993/19181, WO 2003/033651 and Urwin, et al., (1998) Planta 204:472-479, Williamson, (1999) Curr Opin Plant Bio. 2(4):327-31; U.S. Pat. Nos. 6,284,948 and 7,301,069 and miR164 genes (WO 2012/058266).

[0247] (U) Genes that confer resistance to Phytophthora Root Rot, such as the Rps 1, Rps 1-a, Rps 1-b, Rps 1-c, Rps 1-d, Rps 1-e, Rps 1-k, Rps 2, Rps 3-a, Rps 3-b, Rps 3-c, Rps 4, Rps 5, Rps 6, Rps 7 and other Rps genes. See, for example, Shoemaker, et al., Phytophthora Root Rot Resistance Gene Mapping in Soybean, Plant Genome IV Conference, San Diego, Calif. (1995).

[0248] (V) Genes that confer resistance to Brown Stem Rot, such as described in U.S. Pat. No. 5,689,035 and incorporated by reference for this purpose.

[0249] (W) Genes that confer resistance to Colletotrichum, such as described in US Patent Application Publication US 2009/0035765 and incorporated by reference for this purpose. This includes the Rcg locus that may be utilized as a single locus conversion.

2. Transgenes that Confer Resistance to a Herbicide, for Example:

[0250] (A) A polynucleotide encoding resistance to a herbicide that inhibits the growing point or meristem, such as an imidazolinone or a sulfonylurea. Exemplary genes in this category code for mutant ALS and AHAS enzyme as described, for example, by Lee, et al., (1988) EMBO J. 7:1241 and Miki, et al., (1990) Theor. Appl. Genet. 80:449, respectively. See also, U.S. Pat. Nos. 5,605,011; 5,013,659; 5,141,870; 5,767,361; 5,731,180; 5,304,732; 4,761,373; 5,331,107; 5,928,937 and 5,378,824; U.S. patent application Ser. No. 11/683,737 and International Publication WO 1996/33270.

[0251] (B) A polynucleotide encoding a protein for resistance to Glyphosate (resistance imparted by mutant 5-enolpyruvi-3-phosphikimate synthase (EPSP) and aroA genes, respectively) and other phosphono compounds such as glufosinate (phosphinothricin acetyl transferase (PAT) and Streptomyces hygroscopicus phosphinothricin acetyl transferase (bar) genes), and pyridinoxy or phenoxy proprionic acids and cyclohexones (ACCase inhibitor-encoding genes). See, for example, U.S. Pat. No. 4,940,835 to Shah, et al., which discloses the nucleotide sequence of a form of EPSPS which can confer glyphosate resistance. U.S. Pat. No. 5,627,061 to Barry, et al., also describes genes encoding EPSPS enzymes. See also, U.S. Pat. Nos. 6,566,587; 6,338,961; 6,248,876; 6,040,497; 5,804,425; 5,633,435; 5,145,783; 4,971,908; 5,312,910; 5,188,642; 5,094,945, 4,940,835; 5,866,775; 6,225,114; 6,130,366; 5,310,667; 4,535,060; 4,769,061; 5,633,448; 5,510,471; Re. 36,449; RE 37,287 E and 5,491,288 and International Publications EP 1173580; WO 2001/66704; EP 1173581 and EP 1173582, which are incorporated herein by reference for this purpose. Glyphosate resistance is also imparted to plants that express a gene encoding a glyphosate oxido-reductase enzyme as described more fully in U.S. Pat. Nos. 5,776,760 and 5,463,175, which are incorporated herein by reference for this purpose. In addition, glyphosate resistance can be imparted to plants by the over expression of genes encoding glyphosate N-acetyltransferase. See, for example, U.S. Pat. Nos. 7,462,481; 7,405,074 and US Patent Application Publication Number US 2008/0234130. A DNA molecule encoding a mutant aroA gene can be obtained under ATCC® Accession Number 39256, and the nucleotide sequence of the mutant gene is disclosed in U.S. Pat. No. 4,769,061 to Comai. EP Application Number 0 333 033 to Kumada, et al., and U.S. Pat. No. 4,975,374 to Goodman, et al., disclose nucleotide sequences of glutamine synthetase genes which confer resistance to herbicides such as L-phosphinothricin. The nucleotide sequence of a phosphinothricin-acetyl-transferase gene is provided in EP Application Numbers 0 242 246 and 0 242 236 to Leemans, et al.; De Greef, et al., (1989) Bio/Technology 7:61, describe the production of transgenic plants that express chimeric bar genes coding for phosphinothricin acetyl transferase activity. See also, U.S. Pat. Nos. 5,969,213; 5,489,520; 5,550,318; 5,874,265; 5,919,675; 5,561,236; 5,648,477; 5,646,024; 6,177,616 and 5,879,903, which are incorporated herein by reference for this purpose. Exemplary genes conferring resistance to phenoxy proprionic acids and cyclohexones, such as sethoxydim and haloxyfop, are the Acc1-S1, Acc1-S2 and Acc1-S3 genes described by Marshall, et al., (1992) Theor. Appl. Genet. 83:435.

[0252] (C) A polynucleotide encoding a protein for resistance to herbicide that inhibits photosynthesis, such as a triazine (psbA and gs+ genes) and a benzonitrile (nitrilase gene). Przibilla, et al., (1991) Plant Cell 3:169, describe the transformation of Chlamydomonas with plasmids encoding mutant psbA genes. Nucleotide sequences for nitrilase genes are disclosed in U.S. Pat. No. 4,810,648 to Stalker and DNA molecules containing these genes are available under ATCC® Accession Numbers 53435, 67441 and 67442. Cloning and expression of DNA coding for a glutathione S-transferase is described by Hayes, et al., (1992) Biochem. J. 285:173.

[0253] (D) A polynucleotide encoding a protein for resistance to Acetohydroxy acid synthase, which has been found to make plants that express this enzyme resistant to multiple types of herbicides, has been introduced into a variety of plants (see, e.g., Hattori, et al., (1995) Mol Gen Genet. 246:419). Other genes that confer resistance to herbicides include: a gene encoding a chimeric protein of rat cytochrome P4507A1 and yeast NADPH-cytochrome P450 oxidoreductase (Shiota, et al., (1994) Plant Physiol 106:17), genes for glutathione reductase and superoxide dismutase (Aono, et al., (1995) Plant Cell Physiol 36:1687) and genes for various phosphotransferases (Datta, et al., (1992) Plant Mol Biol 20:619).

[0254] (E) A polynucleotide encoding resistance to a herbicide targeting Protoporphyrinogen oxidase (protox) which is necessary for the production of chlorophyll. The protox enzyme serves as the target for a variety of herbicidal compounds. These herbicides also inhibit growth of all the different species of plants present, causing their total destruction. The development of plants containing altered protox activity which are resistant to these herbicides are described in U.S. Pat. Nos. 6,288,306; 6,282,83 and 5,767,373 and International Publication WO 2001/12825.

[0255] (F) The aad-1 gene (originally from Sphingobium herbicidovorans) encodes the aryloxyalkanoate dioxygenase (AAD-1) protein. The trait confers tolerance to 2,4-dichlorophenoxyacetic acid and aryloxyphenoxypropionate (commonly referred to as “fop” herbicides such as quizalofop) herbicides. The aad-1 gene, itself, for herbicide tolerance in plants was first disclosed in WO 2005/107437 (see also, US 2009/0093366). The aad-12 gene, derived from Delftia acidovorans, which encodes the aryloxyalkanoate dioxygenase (AAD-12) protein that confers tolerance to 2,4-dichlorophenoxyacetic acid and pyridyloxyacetate herbicides by deactivating several herbicides with an aryloxyalkanoate moiety, including phenoxy auxin (e.g., 2,4-D, MCPA), as well as pyridyloxy auxins (e.g., fluroxypyr, triclopyr).

[0256] (G) A polynucleotide encoding a herbicide resistant dicamba monooxygenase disclosed in US Patent Application Publication 2003/0135879 for imparting dicamba tolerance;

[0257] (H) A polynucleotide molecule encoding bromoxynil nitrilase (Bxn) disclosed in U.S. Pat. No. 4,810,648 for imparting bromoxynil tolerance;

[0258] (I) A polynucleotide molecule encoding phytoene (crti) described in Misawa, et al., (1993) Plant J. 4:833-840 and in Misawa, et al., (1994) Plant J. 6:481-489 for norflurazon tolerance.

3. Transgenes that Confer or Contribute to an Altered Grain Characteristic Such as:

[0259] (A) Altered fatty acids, for example, by

[0260] (1) Down-regulation of stearoyl-ACP to increase stearic acid content of the plant. See, Knultzon, et al., (1992) Proc. Natl. Acad. Sci. USA 89:2624 and WO 1999/64579 (Genes to Alter Lipid Profiles in Corn).

[0261] (2) Elevating oleic acid via FAD-2 gene modification and/or decreasing linolenic acid via FAD-3 gene modification (see, U.S. Pat. Nos. 6,063,947; 6,323,392; 6,372,965 and WO 1993/11245).

[0262] (3) Altering conjugated linolenic or linoleic acid content, such as in WO 2001/12800.

[0263] (4) Altering LEC1, AGP, Dek1, Superal1, mi1 ps, and various Ipa genes such as Ipa1, Ipa3, hpt or hggt. For example, see, WO 2002/42424, WO 1998/22604, WO 2003/011015, WO 2002/057439, WO 2003/011015, U.S. Pat. Nos. 6,423,886, 6,197,561, 6,825,397 and US Patent Application Publication Numbers US 2003/0079247, US 2003/0204870 and Rivera-Madrid, et al., (1995) Proc. Natl. Acad. Sci. 92:5620-5624.

[0264] (5) Genes encoding delta-8 desaturase for making long-chain polyunsaturated fatty acids (U.S. Pat. Nos. 8,058,571 and 8,338,152), delta-9 desaturase for lowering saturated fats (U.S. Pat. No. 8,063,269), Primula Δ6-desaturase for improving omega-3 fatty acid profiles.

[0265] (6) Isolated nucleic acids and proteins associated with lipid and sugar metabolism regulation, in particular, lipid metabolism protein (LMP) used in methods of producing transgenic plants and modulating levels of seed storage compounds including lipids, fatty acids, starches or seed storage proteins and use in methods of modulating the seed size, seed number, seed weights, root length and leaf size of plants (EP 2404499).

[0266] (7) Altering expression of a High-Level Expression of Sugar-Inducible 2 (HSI2) protein in the plant to increase or decrease expression of HSI2 in the plant. Increasing expression of HSI2 increases oil content while decreasing expression of HSI2 decreases abscisic acid sensitivity and/or increases drought resistance (US Patent Application Publication Number 2012/0066794).

[0267] (8) Expression of cytochrome b5 (Cb5) alone or with FAD2 to modulate oil content in plant seed, particularly to increase the levels of omega-3 fatty acids and improve the ratio of omega-6 to omega-3 fatty acids (US Patent Application Publication Number 2011/0191904).

[0268] (9) Nucleic acid molecules encoding wrinkled1-like polypeptides for modulating sugar metabolism (U.S. Pat. No. 8,217,223).

[0269] (B) Altered phosphorus content, for example, by the

[0270] (1) Introduction of a phytase-encoding gene would enhance breakdown of phytate, adding more free phosphate to the transformed plant. For example, see, Van Hartingsveldt, et al., (1993) Gene 127:87, for a disclosure of the nucleotide sequence of an Aspergillus niger phytase gene.

[0271] (2) Modulating a gene that reduces phytate content. In maize, this, for example, could be accomplished, by cloning and then re-introducing DNA associated with one or more of the alleles, such as the LPA alleles, identified in maize mutants characterized by low levels of phytic acid, such as in WO 2005/113778 and/or by altering inositol kinase activity as in WO 2002/059324, US Patent Application Publication Number 2003/0009011, WO 2003/027243, US Patent Application Publication Number 2003/0079247, WO 1999/05298, U.S. Pat. Nos. 6,197,561, 6,291,224, 6,391,348, WO 2002/059324, US Patent Application Publication Number 2003/0079247, WO 1998/45448, WO 1999/55882, WO 2001/04147.

[0272] (C) Altered carbohydrates affected, for example, by altering a gene for an enzyme that affects the branching pattern of starch or, a gene altering thioredoxin such as NTR and/or TRX (see, U.S. Pat. No. 6,531,648. which is incorporated by reference for this purpose) and/or a gamma zein knock out or mutant such as cs27 or TUSC27 or en27 (see, U.S. Pat. No. 6,858,778 and US Patent Application Publication Number 2005/0160488, US Patent Application Publication Number 2005/0204418, which are incorporated by reference for this purpose). See, Shiroza, et al., (1988) J. Bacteriol. 170:810 (nucleotide sequence of Streptococcus mutant fructosyltransferase gene), Steinmetz, et al., (1985) Mol. Gen. Genet. 200:220 (nucleotide sequence of Bacillus subtilis levansucrase gene), Pen, et al., (1992) Bio/Technology 10:292 (production of transgenic plants that express Bacillus licheniformis alpha-amylase), Elliot, et al., (1993) Plant Molec. Biol. 21:515 (nucleotide sequences of tomato invertase genes), Segaard, et al., (1993) J. Biol. Chem. 268:22480 (site-directed mutagenesis of barley alpha-amylase gene) and Fisher, et al., (1993) Plant Physiol. 102:1045 (maize endosperm starch branching enzyme II), WO 1999/10498 (improved digestibility and/or starch extraction through modification of UDP-D-xylose 4-epimerase, Fragile 1 and 2, Ref1, HCHL, C4H), U.S. Pat. No. 6,232,529 (method of producing high oil seed by modification of starch levels (AGP)). The fatty acid modification genes mentioned herein may also be used to affect starch content and/or composition through the interrelationship of the starch and oil pathways.

[0273] (D) Altered antioxidant content or composition, such as alteration of tocopherol or tocotrienols. For example, see, U.S. Pat. No. 6,787,683, US Patent Application Publication Number 2004/0034886 and WO 2000/68393 involving the manipulation of antioxidant levels and WO 2003/082899 through alteration of a homogentisate geranyl geranyl transferase (hggt).

[0274] (E) Altered essential seed amino acids. For example, see, U.S. Pat. No. 6,127,600 (method of increasing accumulation of essential amino acids in seeds), U.S. Pat. No. 6,080,913 (binary methods of increasing accumulation of essential amino acids in seeds), U.S. Pat. No. 5,990,389 (high lysine), WO 1999/40209 (alteration of amino acid compositions in seeds), WO 1999/29882 (methods for altering amino acid content of proteins), U.S. Pat. No. 5,850,016 (alteration of amino acid compositions in seeds), WO 1998/20133 (proteins with enhanced levels of essential amino acids), U.S. Pat. No. 5,885,802 (high methionine), U.S. Pat. No. 5,885,801 (high threonine), U.S. Pat. No. 6,664,445 (plant amino acid biosynthetic enzymes), U.S. Pat. No. 6,459,019 (increased lysine and threonine), U.S. Pat. No. 6,441,274 (plant tryptophan synthase beta subunit), U.S. Pat. No. 6,346,403 (methionine metabolic enzymes), U.S. Pat. No. 5,939,599 (high sulfur), U.S. Pat. No. 5,912,414 (increased methionine), WO 1998/56935 (plant amino acid biosynthetic enzymes), WO 1998/45458 (engineered seed protein having higher percentage of essential amino acids), WO 1998/42831 (increased lysine), U.S. Pat. No. 5,633,436 (increasing sulfur amino acid content), U.S. Pat. No. 5,559,223 (synthetic storage proteins with defined structure containing programmable levels of essential amino acids for improvement of the nutritional value of plants), WO 1996/01905 (increased threonine), WO 1995/15392 (increased lysine), US Patent Application Publication Number 2003/0163838, US Patent Application Publication Number 2003/0150014, US Patent Application Publication Number 2004/0068767, U.S. Pat. No. 6,803,498, WO 2001/79516.

4. Genes that Control Male-Sterility:

[0275] There are several methods of conferring genetic male sterility available, such as multiple mutant genes at separate locations within the genome that confer male sterility, as disclosed in U.S. Pat. Nos. 4,654,465 and 4,727,219 to Brar, et al., and chromosomal translocations as described by Patterson in U.S. Pat. Nos. 3,861,709 and 3,710,511. In addition to these methods, Albertsen, et al., U.S. Pat. No. 5,432,068, describe a system of nuclear male sterility which includes: identifying a gene which is critical to male fertility; silencing this native gene which is critical to male fertility; removing the native promoter from the essential male fertility gene and replacing it with an inducible promoter; inserting this genetically engineered gene back into the plant; and thus creating a plant that is male sterile because the inducible promoter is not “on” resulting in the male fertility gene not being transcribed. Fertility is restored by inducing or turning “on”, the promoter, which in turn allows the gene that, confers male fertility to be transcribed.

[0276] (A) Introduction of a deacetylase gene under the control of a tapetum-specific promoter and with the application of the chemical N-Ac-PPT (WO 2001/29237).

[0277] (B) Introduction of various stamen-specific promoters (WO 1992/13956, WO 1992/13957).

[0278] (C) Introduction of the bamase and the barstar gene (Paul, et al., (1992) Plant Mol. Biol. 19:611-622).

[0279] For additional examples of nuclear male and female sterility systems and genes, see also, U.S. Pat. Nos. 5,859,341; 6,297,426; 5,478,369; 5,824,524; 5,850,014 and 6,265,640, all of which are hereby incorporated by reference.

5. Genes that Create a Site for Site Specific DNA Integration.

[0280] This includes the introduction of FRT sites that may be used in the FLP/FRT system and/or Lox sites that may be used in the Cre/Loxp system. For example, see, Lyznik, et al., (2003) Plant Cell Rep 21:925-932 and WO 1999/25821, which are hereby incorporated by reference. Other systems that may be used include the Gin recombinase of phage Mu (Maeser, et al., (1991) Vicki Chandler, The Maize Handbook ch. 118 (Springer-Verlag 1994), the Pin recombinase of E. coli (Enomoto, et al., 1983) and the R/RS system of the pSRi plasmid (Araki, et al., 1992).

6. Genes that Affect Abiotic Stress Resistance

[0281] Including but not limited to flowering, ear and seed development, enhancement of nitrogen utilization efficiency, altered nitrogen responsiveness, drought resistance or tolerance, cold resistance or tolerance and salt resistance or tolerance and increased yield under stress.

[0282] (A) For example, see: WO 2000/73475 where water use efficiency is altered through alteration of malate; U.S. Pat. Nos. 5,892,009, 5,965,705, 5,929,305, 5,891,859, 6,417,428, 6,664,446, 6,706,866, 6,717,034, 6,801,104, WO 2000/060089, WO 2001/026459, WO 2001/035725, WO 2001/034726, WO 2001/035727, WO 2001/036444, WO 2001/036597, WO 2001/036598, WO 2002/015675, WO 2002/017430, WO 2002/077185, WO 2002/079403, WO 2003/013227, WO 2003/013228, WO 2003/014327, WO 2004/031349, WO 2004/076638, WO 199809521.

[0283] (B) WO 199938977 describing genes, including CBF genes and transcription factors effective in mitigating the negative effects of freezing, high salinity and drought on plants, as well as conferring other positive effects on plant phenotype.

[0284] (C) US Patent Application Publication Number 2004/0148654 and WO 2001/36596 where abscisic acid is altered in plants resulting in improved plant phenotype such as increased yield and/or increased tolerance to abiotic stress.

[0285] (D) WO 2000/006341, WO 2004/090143, U.S. Pat. Nos. 7,531,723 and 6,992,237 where cytokinin expression is modified resulting in plants with increased stress tolerance, such as drought tolerance, and/or increased yield. Also, see: WO 2002/02776, WO 2003/052063, JP 2002/281975, U.S. Pat. No. 6,084,153, WO 2001/64898, U.S. Pat. Nos. 6,177,275 and 6,107,547 (enhancement of nitrogen utilization and altered nitrogen responsiveness).

[0286] (E) For ethylene alteration, see, US Patent Application Publication Number 2004/0128719, US Patent Application Publication Number 2003/0166197 and WO 2000/32761.

[0287] (F) For plant transcription factors or transcriptional regulators of abiotic stress, see, e.g., US Patent Application Publication Number 2004/0098764 or US Patent Application Publication Number 2004/0078852.

[0288] (G) Genes that increase expression of vacuolar pyrophosphatase such as AVP1 (U.S. Pat. No. 8,058,515) for increased yield; nucleic acid encoding a HSFA4 or a HSFA5 (Heat Shock Factor of the class A4 or A5) polypeptides, an oligopeptide transporter protein (OPT4-like) polypeptide; a plastochron2-like (PLA2-like) polypeptide or a Wuschel related homeobox 1-like (WOX1-like) polypeptide (U. Patent Application Publication Number US 2011/0283420).

[0289] (H) Down regulation of polynucleotides encoding poly (ADP-ribose) polymerase (PARP) proteins to modulate programmed cell death (U.S. Pat. No. 8,058,510) for increased vigor.

[0290] (I) Polynucleotide encoding DTP21 polypeptides for conferring drought resistance (US Patent Application Publication Number US 2011/0277181).

[0291] (J) Nucleotide sequences encoding ACC Synthase 3 (ACS3) proteins for modulating development, modulating response to stress, and modulating stress tolerance (US Patent Application Publication Number US 2010/0287669).

[0292] (K) Polynucleotides that encode proteins that confer a drought tolerance phenotype (DTP) for conferring drought resistance (WO 2012/058528).

[0293] (L) Tocopherol cyclase (TC) genes for conferring drought and salt tolerance (US Patent Application Publication Number 2012/0272352).

[0294] (M) CAAX amino terminal family proteins for stress tolerance (U.S. Pat. No. 8,338,661).

[0295] (N) Mutations in the SAL1 encoding gene have increased stress tolerance, including increased drought resistant (US Patent Application Publication Number 2010/0257633).

[0296] (O) Expression of a nucleic acid sequence encoding a polypeptide selected from the group consisting of: GRF polypeptide, RAA1-like polypeptide, SYR polypeptide, ARKL polypeptide, and YTP polypeptide increasing yield-related traits (US Patent Application Publication Number 2011/0061133).

[0297] (P) Modulating expression in a plant of a nucleic acid encoding a Class III Trehalose Phosphate Phosphatase (TPP) polypeptide for enhancing yield-related traits in plants, particularly increasing seed yield (US Patent Application Publication Number 2010/0024067).

[0298] Other genes and transcription factors that affect plant growth and agronomic traits such as yield, flowering, plant growth and/or plant structure, can be introduced or introgressed into plants, see e.g., WO 1997/49811 (LHY), WO 1998/56918 (ESD4), WO 1997/10339 and U.S. Pat. No. 6,573,430 (TFL), U.S. Pat. No. 6,713,663 (FT), WO 1996/14414 (CON), WO 1996/38560, WO 2001/21822 (VRN1), WO 2000/44918 (VRN2), WO 1999/49064 (GI), WO 2000/46358 (FR1), WO 1997/29123, U.S. Pat. Nos. 6,794,560, 6,307,126 (GAI), WO 1999/09174 (D8 and Rht) and WO 2004/076638 and WO 2004/031349 (transcription factors).

7. Genes that Confer Increased Yield

[0299] (A) A transgenic crop plant transformed by a 1-AminoCyclopropane-1-Carboxylate Deaminase-like Polypeptide (ACCDP) coding nucleic acid, wherein expression of the nucleic acid sequence in the crop plant results in the plant's increased root growth, and/or increased yield, and/or increased tolerance to environmental stress as compared to a wild type variety of the plant (U.S. Pat. No. 8,097,769).

[0300] (B) Over-expression of maize zinc finger protein gene (Zm-ZFP1) using a seed preferred promoter has been shown to enhance plant growth, increase kernel number and total kernel weight per plant (US Patent Application Publication Number 2012/0079623).

[0301] (C) Constitutive over-expression of maize lateral organ boundaries (LOB) domain protein (Zm-LOBDP1) has been shown to increase kernel number and total kernel weight per plant (US Patent Application Publication Number 2012/0079622).

[0302] (D) Enhancing yield-related traits in plants by modulating expression in a plant of a nucleic acid encoding a VIM1 (Variant in Methylation 1-like polypeptide or a VTC2-like (GDP-L-galactose phosphorylase) polypeptide or a DUF1685 polypeptide or an ARF6-like (Auxin Responsive Factor) polypeptide (WO 2012/038893).

[0303] (E) Modulating expression in a plant of a nucleic acid encoding a Ste20-like polypeptide or a homologue thereof gives plants having increased yield relative to control plants (EP 2431472).

[0304] (F) Genes encoding nucleoside diphosphatase kinase (NDK) polypeptides and homologs thereof for modifying the plant's root architecture (US Patent Application Publication Number 2009/0064373).

8. Genes that Confer Plant Digestibility.

[0305] (A) Altering the level of xylan present in the cell wall of a plant by modulating expression of xylan synthase (U.S. Pat. No. 8,173,866).

[0306] In some embodiments, the stacked trait may be a trait or event that has received regulatory approval including but not limited to the events with regulatory approval can be found at the Center for Environmental Risk Assessment (cera-gmc.org/?action=gm_crop_database, which can be accessed using the www prefix) and at the International Service for the Acquisition of Agri-Biotech Applications (isaaa.org/gmapprovaldatabase/default.asp, which can be accessed using the www prefix).

### Gene Silencing

[0307] In some embodiments, the stacked trait may be in the form of silencing of one or more polynucleotides of interest resulting in suppression of one or more target pest polypeptides. In some embodiments, the silencing is achieved using a suppression DNA construct.

[0308] In some embodiments one or more polynucleotide encoding the polypeptides of the IPD103 polypeptide or fragments or variants thereof may be stacked with one or more polynucleotides encoding one or more polypeptides having insecticidal activity or agronomic traits as set forth supra and optionally may further include one or more polynucleotides providing for gene silencing of one or more target polynucleotides as discussed infra.

[0309] “Suppression DNA construct” is a recombinant DNA construct which when transformed or stably integrated into the genome of the plant, results in “silencing” of a target gene in the plant. The target gene may be endogenous or transgenic to the plant. “Silencing,” as used herein with respect to the target gene, refers generally to the suppression of levels of mRNA or protein/enzyme expressed by the target gene, and/or the level of the enzyme activity or protein functionality. The term “suppression” includes lower, reduce, decline, decrease, inhibit, eliminate and prevent. “Silencing” or “gene silencing” does not specify mechanism and is inclusive, and not limited to, anti-sense, cosuppression, viral-suppression, hairpin suppression, stem-loop suppression, RNAi-based approaches and small RNA-based approaches.

[0310] A suppression DNA construct may comprise a region derived from a target gene of interest and may comprise all or part of the nucleic acid sequence of the sense strand (or antisense strand) of the target gene of interest. Depending upon the approach to be utilized, the region may be 100% identical or less than 100% identical (e.g., at least 50% or any integer between 51% and 100% identical) to all or part of the sense strand (or antisense strand) of the gene of interest.

[0311] Suppression DNA constructs can be constructed once the target gene of interest is selected, and include, without limitation, cosuppression constructs, antisense constructs, viral-suppression constructs, hairpin suppression constructs, stem-loop suppression constructs, double-stranded RNA-producing constructs, and more generally, RNAi (RNA interference) constructs and small RNA constructs such as siRNA (short interfering RNA) constructs and miRNA (microRNA) constructs.

[0312] “Antisense inhibition” refers to the production of antisense RNA transcripts capable of suppressing the expression of the target protein.

[0313] “Antisense RNA” refers to an RNA transcript that is complementary to all or part of a target primary transcript or mRNA and that blocks the expression of a target isolated nucleic acid fragment. The complementarity of an antisense RNA may be with any part of the specific gene transcript, i.e., at the 5′ non-coding sequence, 3′ non-coding sequence, introns or the coding sequence.

[0314] “Cosuppression” refers to the production of sense RNA transcripts capable of suppressing the expression of the target protein. “Sense” RNA refers to RNA transcript that includes the mRNA and can be translated into protein within a cell or in vitro. Cosuppression constructs in plants have been previously designed by focusing on overexpression of a nucleic acid sequence having homology to a native mRNA, in the sense orientation, which results in the reduction of all RNA having homology to the overexpressed sequence (see, Vaucheret, et al., (1998) Plant J. 16:651-659 and Gura, (2000) Nature 404:804-808).

[0315] Another variation describes the use of plant viral sequences to direct the suppression of proximal mRNA encoding sequences (PCT Publication WO 1998/36083).

[0316] Recent work has described the use of “hairpin” structures that incorporate all or part, of an mRNA encoding sequence in a complementary orientation that results in a potential “stem-loop” structure for the expressed RNA (PCT Publication WO 1999/53050). In this case the stem is formed by polynucleotides corresponding to the gene of interest inserted in either sense or anti-sense orientation with respect to the promoter and the loop is formed by some polynucleotides of the gene of interest, which do not have a complement in the construct. This increases the frequency of cosuppression or silencing in the recovered transgenic plants. For review of hairpin suppression, see, Wesley, et al., (2003) Methods in Molecular Biology, Plant Functional Genomics: Methods and Protocols 236:273-286.

[0317] A construct where the stem is formed by at least 30 nucleotides from a gene to be suppressed and the loop is formed by a random nucleotide sequence has also effectively been used for suppression (PCT Publication WO 1999/61632).

[0318] The use of poly-T and poly-A sequences to generate the stem in the stem-loop structure has also been described (PCT Publication WO 2002/00894).

[0319] Yet another variation includes using synthetic repeats to promote formation of a stem in the stem-loop structure. Transgenic organisms prepared with such recombinant DNA fragments have been shown to have reduced levels of the protein encoded by the nucleotide fragment forming the loop as described in PCT Publication WO 2002/00904.

[0320] RNA interference refers to the process of sequence-specific post-transcriptional gene silencing in animals mediated by short interfering RNAs (siRNAs) (Fire, et al., (1998) Nature 391:806). The corresponding process in plants is commonly referred to as post-transcriptional gene silencing (PTGS) or RNA silencing and is also referred to as quelling in fungi. The process of post-transcriptional gene silencing is thought to be an evolutionarily-conserved cellular defense mechanism used to prevent the expression of foreign genes and is commonly shared by diverse flora and phyla (Fire, et al., (1999) Trends Genet. 15:358). Such protection from foreign gene expression may have evolved in response to the production of double-stranded RNAs (dsRNAs) derived from viral infection or from the random integration of transposon elements into a host genome via a cellular response that specifically destroys homologous single-stranded RNA of viral genomic RNA. The presence of dsRNA in cells triggers the RNAi response through a mechanism that has yet to be fully characterized.

[0321] The presence of long dsRNAs in cells stimulates the activity of a ribonuclease III enzyme referred to as dicer. Dicer is involved in the processing of the dsRNA into short pieces of dsRNA known as short interfering RNAs (siRNAs) (Berstein, et al., (2001) Nature 409:363). Short interfering RNAs derived from dicer activity are typically about 21 to about 23 nucleotides in length and comprise about 19 base pair duplexes (Elbashir, et al., (2001) Genes Dev. 15:188). Dicer has also been implicated in the excision of 21- and 22-nucleotide small temporal RNAs (stRNAs) from precursor RNA of conserved structure that are implicated in translational control (Hutvagner, et al., (2001) Science 293:834). The RNAi response also features an endonuclease complex, commonly referred to as an RNA-induced silencing complex (RISC), which mediates cleavage of single-stranded RNA having sequence complementarity to the antisense strand of the siRNA duplex. Cleavage of the target RNA takes place in the middle of the region complementary to the antisense strand of the siRNA duplex (Elbashir, et al., (2001) Genes Dev. 15:188). In addition, RNA interference can also involve small RNA (e.g., miRNA) mediated gene silencing, presumably through cellular mechanisms that regulate chromatin structure and thereby prevent transcription of target gene sequences (see, e.g., Allshire, (2002) Science 297:1818-1819; Volpe, et al., (2002) Science 297:1833-1837; Jenuwein, (2002) Science 297:2215-2218 and Hall, et al., (2002) Science 297:2232-2237). As such, miRNA molecules of the disclosure can be used to mediate gene silencing via interaction with RNA transcripts or alternately by interaction with particular gene sequences, wherein such interaction results in gene silencing either at the transcriptional or post-transcriptional level.

[0322] Methods and compositions are further provided which allow for an increase in RNAi produced from the silencing element. In such embodiments, the methods and compositions employ a first polynucleotide comprising a silencing element for a target pest sequence operably linked to a promoter active in the plant cell; and, a second polynucleotide comprising a suppressor enhancer element comprising the target pest sequence or an active variant or fragment thereof operably linked to a promoter active in the plant cell. The combined expression of the silencing element with suppressor enhancer element leads to an increased amplification of the inhibitory RNA produced from the silencing element over that achievable with only the expression of the silencing element alone. In addition to the increased amplification of the specific RNAi species itself, the methods and compositions further allow for the production of a diverse population of RNAi species that can enhance the effectiveness of disrupting target gene expression. As such, when the suppressor enhancer element is expressed in a plant cell in combination with the silencing element, the methods and composition can allow for the systemic production of RNAi throughout the plant; the production of greater amounts of RNAi than would be observed with just the silencing element construct alone; and, the improved loading of RNAi into the phloem of the plant, thus providing better control of phloem feeding insects by an RNAi approach. Thus, the various methods and compositions provide improved methods for the delivery of inhibitory RNA to the target organism. See, for example, US Patent Application Publication 2009/0188008.

[0323] As used herein, a “suppressor enhancer element” comprises a polynucleotide comprising the target sequence to be suppressed or an active fragment or variant thereof. It is recognized that the suppressor enhancer element need not be identical to the target sequence, but rather, the suppressor enhancer element can comprise a variant of the target sequence, so long as the suppressor enhancer element has sufficient sequence identity to the target sequence to allow for an increased level of the RNAi produced by the silencing element over that achievable with only the expression of the silencing element. Similarly, the suppressor enhancer element can comprise a fragment of the target sequence, wherein the fragment is of sufficient length to allow for an increased level of the RNAi produced by the silencing element over that achievable with only the expression of the silencing element.

[0324] It is recognized that multiple suppressor enhancer elements from the same target sequence or from different target sequences or from different regions of the same target sequence can be employed. For example, the suppressor enhancer elements employed can comprise fragments of the target sequence derived from different region of the target sequence (i.e., from the 3′UTR, coding sequence, intron, and/or 5′UTR). Further, the suppressor enhancer element can be contained in an expression cassette, as described elsewhere herein, and in specific embodiments, the suppressor enhancer element is on the same or on a different DNA vector or construct as the silencing element. The suppressor enhancer element can be operably linked to a promoter as disclosed herein. It is recognized that the suppressor enhancer element can be expressed constitutively or alternatively, it may be produced in a stage-specific manner employing the various inducible or tissue-preferred or developmentally regulated promoters that are discussed elsewhere herein.

[0325] In specific embodiments, employing both a silencing element and the suppressor enhancer element the systemic production of RNAi occurs throughout the entire plant. In further embodiments, the plant or plant parts of the disclosure have an improved loading of RNAi into the phloem of the plant than would be observed with the expression of the silencing element construct alone and, thus provide better control of phloem feeding insects by an RNAi approach. In specific embodiments, the plants, plant parts and plant cells of the disclosure can further be characterized as allowing for the production of a diversity of RNAi species that can enhance the effectiveness of disrupting target gene expression.

[0326] In specific embodiments, the combined expression of the silencing element and the suppressor enhancer element increases the concentration of the inhibitory RNA in the plant cell, plant, plant part, plant tissue or phloem over the level that is achieved when the silencing element is expressed alone.

[0327] As used herein, an “increased level of inhibitory RNA” comprises any statistically significant increase in the level of RNAi produced in a plant having the combined expression when compared to an appropriate control plant. For example, an increase in the level of RNAi in the plant, plant part or the plant cell can comprise at least about a 1%, about a 1%-5%, about a 5%-10%, about a 10%-20%, about a 20%-30%, about a 30%-40%, about a 40%-50%, about a 50%-60%, about 60-70%, about 70%-80%, about a 80%-90%, about a 90%-100% or greater increase in the level of RNAi in the plant, plant part, plant cell or phloem when compared to an appropriate control. In other embodiments, the increase in the level of RNAi in the plant, plant part, plant cell or phloem can comprise at least about a 1 fold, about a 1 fold-5 fold, about a 5 fold-10 fold, about a 10 fold-20 fold, about a 20 fold-30 fold, about a 30 fold-40 fold, about a 40 fold-50 fold, about a 50 fold-60 fold, about 60 fold-70 fold, about 70 fold-80 fold, about a 80 fold-90 fold, about a 90 fold-100 fold or greater increase in the level of RNAi in the plant, plant part, plant cell or phloem when compared to an appropriate control. Examples of combined expression of the silencing element with suppressor enhancer element for the control of Stinkbugs and Lygus can be found in US Patent Application Publication 2011/0301223 and US Patent Application Publication 2009/0192117.

[0328] Some embodiments relate to down-regulation of expression of target genes in insect pest species by interfering ribonucleic acid (RNA) molecules. PCT Publication WO 2007/074405 describes methods of inhibiting expression of target genes in invertebrate pests including Colorado potato beetle. PCT Publication WO 2005/110068 describes methods of inhibiting expression of target genes in invertebrate pests including in particular Western corn rootworm as a means to control insect infestation. Furthermore, PCT Publication WO 2009/091864 describes compositions and methods for the suppression of target genes from insect pest species including pests from the Lygus genus. Nucleic acid molecules including RNAi for targeting the vacuolar ATPase H subunit, useful for controlling a coleopteran pest population and infestation as described in US Patent Application Publication 2012/0198586. PCT Publication WO 2012/055982 describes ribonucleic acid (RNA or double stranded RNA) that inhibits or down regulates the expression of a target gene that encodes: an insect ribosomal protein such as the ribosomal protein L19, the ribosomal protein L40 or the ribosomal protein S27A; an insect proteasome subunit such as the Rpn6 protein, the Pros 25, the Rpn2 protein, the proteasome beta 1 subunit protein or the Pros beta 2 protein; an insect β-coatomer of the COPI vesicle, the γ-coatomer of the COPI vesicle, the β′-coatomer protein or the ζ-coatomer of the COPI vesicle; an insect Tetraspanine 2 A protein which is a putative transmembrane domain protein; an insect protein belonging to the actin family such as Actin 5C; an insect ubiquitin-5E protein; an insect Sec23 protein which is a GTPase activator involved in intracellular protein transport; an insect crinkled protein which is an unconventional myosin which is involved in motor activity; an insect crooked neck protein which is involved in the regulation of nuclear alternative mRNA splicing; an insect vacuolar H+-ATPase G-subunit protein and an insect Tbp-1 such as Tat-binding protein. PCT publication WO 2007/035650 describes ribonucleic acid (RNA or double stranded RNA) that inhibits or down regulates the expression of a target gene that encodes Snf7. US Patent Application publication 2011/0054007 describes polynucleotide silencing elements targeting RPS10. US Patent Application publication 2014/0275208 and US2015/0257389 describes polynucleotide silencing elements targeting RyanR and PAT3. US Patent Application Publications 2012/029750, US 20120297501, and 2012/0322660 describe interfering ribonucleic acids (RNA or double stranded RNA) that functions upon uptake by an insect pest species to down-regulate expression of a target gene in said insect pest, wherein the RNA comprises at least one silencing element wherein the silencing element is a region of double-stranded RNA comprising annealed complementary strands, one strand of which comprises or consists of a sequence of nucleotides which is at least partially complementary to a target nucleotide sequence within the target gene. US Patent Application Publication 2012/0164205 describe potential targets for interfering double stranded ribonucleic acids for inhibiting invertebrate pests including: a Chd3 Homologous Sequence, a Beta-Tubulin Homologous Sequence, a 40 kDa V-ATPase Homologous Sequence, a EF1α Homologous Sequence, a 26S Proteosome Subunit p28 Homologous Sequence, a Juvenile Hormone Epoxide Hydrolase Homologous Sequence, a Swelling Dependent Chloride Channel Protein Homologous Sequence, a Glucose-6-Phosphate 1-Dehydrogenase Protein Homologous Sequence, an Act42A Protein Homologous Sequence, a ADP-Ribosylation Factor 1 Homologous Sequence, a Transcription Factor IIB Protein Homologous Sequence, a Chitinase Homologous Sequences, a Ubiquitin Conjugating Enzyme Homologous Sequence, a Glyceraldehyde-3-Phosphate Dehydrogenase Homologous Sequence, an Ubiquitin B Homologous Sequence, a Juvenile Hormone Esterase Homolog, and an Alpha Tubuliln Homologous Sequence.

### Use in Pesticidal Control

[0329] General methods for employing strains comprising a nucleic acid sequence of the embodiments or a variant thereof, in pesticide control or in engineering other organisms as pesticidal agents can be used.

[0330] Microorganism hosts that occupy the “phytosphere” (phylloplane, phyllosphere, rhizosphere, and/or rhizoplana) of one or more crops of interest may be selected. These microorganisms are selected so as to be capable of successfully competing in the particular environment with the wild-type microorganisms, provide for stable maintenance and expression of the gene expressing the IPD103 polypeptide and desirably provide for improved protection of the pesticide from environmental degradation and inactivation.

### Pesticidal Compositions

[0331] In some embodiments, the active ingredients can be applied in the form of compositions and can be applied to the crop area or plant to be treated, simultaneously or in succession, with other compounds. These compounds can be fertilizers, weed killers, Cryoprotectants, surfactants, detergents, pesticidal soaps, dormant oils, polymers, and/or time-release or biodegradable carrier formulations that permit long-term dosing of a target area following a single application of the formulation. They can also be selective herbicides, chemical insecticides, virucides, microbicides, amoebicides, pesticides, fungicides, bacteriocides, nematocides molluscicides or mixtures of several of these preparations, if desired, together with further agriculturally acceptable carriers, surfactants or application-promoting adjuvants. Suitable carriers and adjuvants can be solid or liquid and correspond to the substances ordinarily employed in formulation technology, e.g. natural or regenerated mineral substances, solvents, dispersants, wetting agents, tackifiers, binders or fertilizers. Likewise, the formulations may be prepared into edible “baits” or fashioned into pest “traps” to permit feeding or ingestion by a target pest of the pesticidal formulation.

[0332] Methods of applying an active ingredient or an agrochemical composition that contains at least one of the IPD103 polypeptide produced by the bacterial strains include leaf application, seed coating and soil application. The number of applications and the rate of application depend on the intensity of infestation by the corresponding pest.

[0333] The composition may be formulated as a powder, dust, pellet, granule, spray, emulsion, colloid, solution or such like, and may be prepared by such conventional means as desiccation, lyophilization, homogenation, extraction, filtration, centrifugation, sedimentation or concentration of a culture of cells comprising the polypeptide. In all such compositions that contain at least one such pesticidal polypeptide, the polypeptide may be present in a concentration of from about 1% to about 99% by weight.

[0334] Lepidopteran, Dipteran, Heteropteran, nematode, Hemiptera or Coleopteran pests may be killed or reduced in numbers in a given area by the methods of the disclosure or may be prophylactically applied to an environmental area to prevent infestation by a susceptible pest. Preferably the pest ingests or is contacted with, a pesticidally-effective amount of the polypeptide. “Pesticidally-effective amount” as used herein refers to an amount of the pesticide that is able to bring about death to at least one pest or to noticeably reduce pest growth, feeding or normal physiological development. This amount will vary depending on such factors as, for example, the specific target pests to be controlled, the specific environment, location, plant, crop or agricultural site to be treated, the environmental conditions and the method, rate, concentration, stability, and quantity of application of the pesticidally-effective polypeptide composition. The formulations may also vary with respect to climatic conditions, environmental considerations, and/or frequency of application and/or severity of pest infestation.

[0335] The pesticide compositions described may be made by formulating the bacterial cell, Crystal and/or spore suspension or isolated protein component with the desired agriculturally-acceptable carrier. The compositions may be formulated prior to administration in an appropriate means such as lyophilized, freeze-dried, desiccated or in an aqueous carrier, medium or suitable diluent, such as saline or other buffer. The formulated compositions may be in the form of a dust or granular material or a suspension in oil (vegetable or mineral) or water or oil/water emulsions or as a wettable powder or in combination with any other carrier material suitable for agricultural application. Suitable agricultural carriers can be solid or liquid can be used. The term “agriculturally-acceptable carrier” covers all adjuvants, inert components, dispersants, surfactants, tackifiers, binders, etc. that are used in pesticide formulation technology in pesticide formulation. The formulations may be mixed with one or more solid or liquid adjuvants and prepared by various means, e.g., by homogeneously mixing, blending and/or grinding the pesticidal composition with suitable adjuvants using conventional formulation techniques. Suitable formulations and application methods are described in U.S. Pat. No. 6,468,523, herein incorporated by reference. The plants can also be treated with one or more chemical compositions, including one or more herbicide, insecticides or fungicides. Exemplary chemical compositions include: Fruits/Vegetables Herbicides: Atrazine, Bromacil, Diuron, Glyphosate, Linuron, Metribuzin, Simazine, Trifluralin, Fluazifop, Glufosinate, Halo sulfuron Gowan, Paraquat, Propyzamide, Sethoxydim, Butafenacil, Halosulfuron, Indaziflam; Fruits/Vegetables Insecticides: Aldicarb, Bacillus thuringiensis, Carbaryl, Carbofuran, Chlorpyrifos, Cypermethrin, Deltamethrin, Diazinon, Malathion, Abamectin, Cyfluthrin/beta-cyfluthrin, Esfenvalerate, Lambda-cyhalothrin, Acequinocyl, Bifenazate, Methoxyfenozide, Novaluron, Chromafenozide, Thiacloprid, Dinotefuran, FluaCrypyrim, Tolfenpyrad, Clothianidin, Spirodiclofen, Gamma-cyhalothrin, Spiromesifen, Spinosad, Rynaxypyr, Cyazypyr, Spinoteram, Triflumuron, Spirotetramat, Imidacloprid, Flubendiamide, Thiodicarb, Metaflumizone, Sulfoxaflor, Cyflumetofen, Cyanopyrafen, Imidacloprid, Clothianidin, Thiamethoxam, Spinotoram, Thiodicarb, Flonicamid, Methiocarb, Emamectin-benzoate, Indoxacarb, Forthiazate, Fenamiphos, Cadusaphos, Pyriproxifen, Fenbutatin-oxid, Hexthiazox, Methomyl, 4-[[(6-Chlorpyridin-3-yl)methyl](2,2-difluorethyl)amino]furan-2(5H)-on; Fruits/Vegetables Fungicides: Carbendazim, Chlorothalonil, EBDCs, Sulphur, Thiophanate-methyl, Azoxystrobin, Cymoxanil, Fluazinam, Fosetyl, Iprodione, Kresoxim-methyl, Metalaxyl/mefenoxam, Trifloxystrobin, Ethaboxam, Iprovalicarb, Trifloxystrobin, Fenhexamid, Oxpoconazole fumarate, Cyazofamid, Fenamidone, Zoxamide, Picoxystrobin, Pyraclostrobin, Cyflufenamid, Boscalid; Cereals Herbicides: Isoproturon, Bromoxynil, Ioxynil, Phenoxies, Chlorsulfuron, Clodinafop, Diclofop, Diflufenican, Fenoxaprop, Florasulam, Fluoroxypyr, Metsulfuron, Triasulfuron, Flucarbazone, lodosulfuron, Propoxycarbazone, Picolinafen, Mesosulfuron, Beflubutamid, Pinoxaden, Amidosulfuron, Thifensulfuron Methyl, Tribenuron, Flupyrsulfuron, Sulfosulfuron, Pyrasulfotole, Pyroxsulam, Flufenacet, Tralkoxydim, Pyroxasulfon; Cereals Funaicides: Carbendazim, Chlorothalonil, Azoxystrobin, Cyproconazole, Cyprodinil, Fenpropimorph, Epoxiconazole, Kresoxim-methyl, Quinoxyfen, Tebuconazole, Trifloxystrobin, Simeconazole, Picoxystrobin, Pyraclostrobin, Dimoxystrobin, Prothioconazole, Fluoxastrobin; Cereals Insecticides: Dimethoate, Lambda-cyhalthrin, Deltamethrin, alpha-Cypermethrin, β-cyfluthrin, Bifenthrin, Imidacloprid, Clothianidin, Thiamethoxam, Thiacloprid, Acetamiprid, Dinetofuran, Clorphyriphos, Metamidophos, Oxidemethon-methyl, Pirimicarb, Methiocarb; Maize Herbicides: Atrazine, Alachlor, Bromoxynil, Acetochlor, Dicamba, Clopyralid, (S-) Dimethenamid, Glufosinate, Glyphosate, Isoxaflutole, (S-)Metolachlor, Mesotrione, Nicosulfuron, Primisulfuron, Rimsulfuron, Sulcotrione, Foramsulfuron, Topramezone, Tembotrione, Saflufenacil, Thiencarbazone, Flufenacet, Pyroxasulfon; Maize Insecticides: Carbofuran, Chlorpyrifos, Bifenthrin, Fipronil, Imidacloprid, Lambda-Cyhalothrin, Tefluthrin, Terbufos, Thiamethoxam, Clothianidin, Spiromesifen, Flubendiamide, Triflumuron, Rynaxypyr, Deltamethrin, Thiodicarb, β-Cyfluthrin, Cypermethrin, Bifenthrin, Lufenuron, Triflumoron, Tefluthrin, Tebupirimphos, Ethiprole, Cyazypyr, Thiacloprid, Acetamiprid, Dinetofuran, Avermectin, Methiocarb, Spirodiclofen, Spirotetramat; Maize Fungicides: Fenitropan, Thiram, Prothioconazole, Tebuconazole, Trifloxystrobin; Rice Herbicides: Butachlor, Propanil, Azimsulfuron, Bensulfuron, Cyhalofop, Daimuron, Fentrazamide, Imazosulfuron, Mefenacet, Oxaziclomefone, Pyrazosulfuron, Pyributicarb, Quinclorac, Thiobencarb, Indanofan, Flufenacet, Fentrazamide, Halosulfuron, Oxaziclomefone, Benzobicyclon, Pyriftalid, Penoxsulam, Bispyribac, Oxadiargyl, Ethoxysulfuron, Pretilachlor, Mesotrione, Tefuryltrione, Oxadiazone, Fenoxaprop, Pyrimisulfan; Rice Insecticides: Diazinon, Fenitrothion, Fenobucarb, Monocrotophos, Benfuracarb, Buprofezin, Dinotefuran, Fipronil, Imidacloprid, Isoprocarb, Thiacloprid, Chromafenozide, Thiacloprid, Dinotefuran, Clothianidin, Ethiprole, Flubendiamide, Rynaxypyr, Deltamethrin, Acetamiprid, Thiamethoxam, Cyazypyr, Spinosad, Spinotoram, Emamectin-Benzoate, Cypermethrin, Chlorpyriphos, Cartap, Methamidophos, Etofenprox, Triazophos, 4-[[(6-Chlorpyrdin-3-yl)methyl](2,2-difluorethyl)amino]furan-2(5H)-on, Carbofuran, Benfuracarb; Rice Fungicides: Thiophanate-methyl, Azoxystrobin, Carpropamid, Edifenphos, Ferimzone, Iprobenfos, Isoprothiolane, Pencycuron, Probenazole, Pyroquilon, Tricyclazole, Trifloxystrobin, Diclocymet, Fenoxanil, Simeconazole, Tiadinil; Cotton Herbicides: Diuron, Fluometuron, MSMA, Oxyfluorfen, Prometryn, Trifluralin, Carfentrazone, Clethodim, Fluazifop-butyl, Glyphosate, Norflurazon, Pendimethalin, Pyrithiobac-sodium, Trifloxysulfuron, Tepraloxydim, Glufosinate, Flumioxazin, Thidiazuron; Cotton Insecticides: Acephate, Aldicarb, Chlorpyrifos, Cypermethrin, Deltamethrin, Malathion, Monocrotophos, Abamectin, Acetamiprid, Emamectin Benzoate, Imidacloprid, Indoxacarb, Lambda-Cyhalothrin, Spinosad, Thiodicarb, Gamma-Cyhalothrin, Spiromesifen, Pyridalyl, Flonicamid, Flubendiamide, Triflumuron, Rynaxypyr, Beta-Cyfluthrin, Spirotetramat, Clothianidin, Thiamethoxam, Thiacloprid, Dinetofuran, Flubendiamide, Cyazypyr, Spinosad, Spinotoram, gamma Cyhalothrin, 4-[[(6-Chlorpyridin-3-yl)methyl](2,2-difluorethyl)amino]furan-2(5H)-on, Thiodicarb, Avermectin, Flonicamid, Pyridalyl, Spiromesifen, Sulfoxaflor, Profenophos, Thriazophos, Endosulfan; Cotton Funaicides: Etridiazole, Metalaxyl, Quintozene; Soybean Herbicides: Alachlor, Bentazone, Trifluralin, Chlorimuron-Ethyl, Cloransulam-Methyl, Fenoxaprop, Fomesafen, Fluazifop, Glyphosate, Imazamox, Imazaquin, Imazethapyr, (S-)Metolachlor, Metribuzin, Pendimethalin, Tepraloxydim, Glufosinate; Soybean Insecticides: Lambda-cyhalothrin, Methomyl, Parathion, Thiocarb, Imidacloprid, Clothianidin, Thiamethoxam, Thiacloprid, Acetamiprid, Dinetofuran, Flubendiamide, Rynaxypyr, Cyazypyr, Spinosad, Spinotoram, Emamectin-Benzoate, Fipronil, Ethiprole, Deltamethrin, s-Cyfluthrin, gamma and lambda Cyhalothrin, 4-[[(6-Chlorpyridin-3-yl)methyl](2,2-difluorethyl)amino]furan-2(5H)-on, Spirotetramat, Spinodiclofen, Triflumuron, Flonicamid, Thiodicarb, beta-Cyfluthrin; Soybean Funaicides: Azoxystrobin, Cyproconazole, Epoxiconazole, Flutriafol, Pyraclostrobin, Tebuconazole, Trifloxystrobin, Prothioconazole, Tetraconazole; Sugarbeet Herbicides: Chloridazon, Desmedipham, Ethofumesate, Phenmedipham, Triallate, Clopyralid, Fluazifop, Lenacil, Metamitron, Quinmerac, Cycloxydim, Triflusulfuron, Tepraloxydim, Quizalofop; Sugarbeet Insecticides: Imidacloprid, Clothianidin, Thiamethoxam, Thiacloprid, Acetamiprid, Dinetofuran, Deltamethrin, s-Cyfluthrin, gamma/lambda Cyhalothrin, 4-[[(6-Chlorpyridin-3-yl)methyl](2,2-difluorethyl)amino]furan-2(5H)-on, Tefluthrin, Rynaxypyr, Cyaxypyr, Fipronil, Carbofuran; Canola Herbicides: Clopyralid, Diclofop, Fluazifop, Glufosinate, Glyphosate, Metazachlor, Trifluralin Ethametsulfuron, Quinmerac, Quizalofop, Clethodim, Tepraloxydim; Canola Fungicides: Azoxystrobin, Carbendazim, Fludioxonil, Iprodione, Prochloraz, Vinclozolin; Canola Insecticides: Carbofuran organophosphates, Pyrethroids, Thiacloprid, Deltamethrin, Imidacloprid, Clothianidin, Thiamethoxam, Acetamiprid, Dinetofuran, β-Cyfluthrin, gamma and lambda Cyhalothrin, tau-Fluvaleriate, Ethiprole, Spinosad, Spinotoram, Flubendiamide, Rynaxypyr, Cyazypyr, 4-[[(6-Chlorpyridin-3-yl)methyl](2,2-difluorethyl)amino]furan-2(5H)-on.

[0336] In some embodiments, the herbicide is Atrazine, Bromacil, Diuron, Chlorsulfuron, Metsulfuron, Thifensulfuron Methyl, Tribenuron, Acetochlor, Dicamba, Isoxaflutole, Nicosulfuron, Rimsulfuron, Pyrithiobac-sodium, Flumioxazin, Chlorimuron-Ethyl, Metribuzin, Quizalofop, S-metolachlor, Hexazinne or combinations thereof.

[0337] In some embodiments, the insecticide is Esfenvalerate, Chlorantraniliprole, Methomyl, Indoxacarb, Oxamyl or combinations thereof.

### Pesticidal and Insecticidal Activity

[0338] “Pest” includes but is not limited to, insects, fungi, bacteria, nematodes, mites, ticks and the like. Insect pests include insects selected from the orders Coleoptera, Diptera, Hymenoptera, Lepidoptera, Mallophaga, Homoptera, Hemiptera Orthroptera, Thysanoptera, Dermaptera, Isoptera, Anoplura, Siphonaptera, Trichoptera, etc., particularly Lepidoptera and Coleoptera.

[0339] Compounds of the embodiments display activity against insect pests, which may include economically important agronomic, forest, greenhouse, nursery ornamentals, food and fiber, public and animal health, domestic and commercial structure, household and stored product pests.

[0340] Larvae of the order Lepidoptera include, but are not limited to, armyworms, cutworms, loopers and heliothines in the family Noctuidae Spodoptera frugiperda JE Smith (fall armyworm); S. exigua Hübner (beet armyworm); S. litura Fabricius (tobacco cutworm, cluster caterpillar); Mamestra configurata Walker (bertha armyworm); M. brassicae Linnaeus (cabbage moth); Agrotis ipsilon Hufnagel (black cutworm); A. orthogonia Morrison (western cutworm); A. subterranea Fabricius (granulate cutworm); Alabama argillacea Hübner (cotton leaf worm); Trichoplusia ni Hübner (cabbage looper); Pseudoplusia includens Walker (soybean looper); Anticarsia gemmatalis Hübner (velvetbean caterpillar); Hypena scabra Fabricius (green cloverworm); Heliothis virescens Fabricius (tobacco budworm); Pseudaletia unipuncta Haworth (armyworm); Athetis mindara Barnes and Mcdunnough (rough skinned cutworm); Euxoa messoria Harris (darksided cutworm); Earias insulana Boisduval (spiny bollworm); E. vittella Fabricius (spotted bollworm); Helicoverpa armigera Hübner (American bollworm); H. zea Boddie (corn earworm or cotton bollworm); Melanchra picta Harris (zebra caterpillar); Egir (Xylomyges) curialis Grote (citrus cutworm); borers, casebearers, webworms, coneworms, and skeletonizers from the family Pyralidae Ostrinia nubilais Hübner (European corn borer); Amyelois transitella Walker (naval orangeworm); Anagasta kuehniella Zeller (Mediterranean flour moth); Cadra cautella Walker (almond moth); Chilo suppessalis Walker (rice stem borer); C. partellus, (sorghum borer); Corcyra cephalonica Stainton (rice moth); Crambus caliginosellus Clemens (corn root webworm); C. teterrellus Zincken (bluegrass webworm); Cnaphalocrocis medinalis Guenée (rice leaf roller); Desmia funeralis Hübner (grape leaffolder); Diaphania hyalinata Linnaeus (melon worm); D. nitidalis Stoll (pickleworm); Diatraea grandiosella Dyar (southwestern corn borer), D. saccharalis Fabricius (surgarcane borer); Eoreuma loftini Dyar (Mexican rice borer); Ephestia elutella Hübner (tobacco (cacao) moth); Galleria mellonella Linnaeus (greater wax moth); Herpetogramma licarsisalis Walker (sod webworm); Homoeosoma electellum Hulst (sunflower moth); Elasmopalpus lignosellus Zeller (lesser cornstalk borer); Achroia grisella Fabricius (lesser wax moth); Loxostege sticticalis Linnaeus (beet webworm); Orthaga thyrisalis Walker (tea tree web moth); Maruca testulalis Geyer (bean pod borer); Plodia interpunctella Hübner (Indian meal moth); Scirpophaga incertulas Walker (yellow stem borer); Udea rubigalis Guenée (celery leaftier); and leafrollers, budworms, seed worms and fruit worms in the family Tortricidae Acleis gloverana Walsingham (Western blackheaded budworm); A. variana Fernald (Eastern blackheaded budworm); Archips argyrospila Walker (fruit tree leaf roller); A. rosana Linnaeus (European leaf roller); and other Archips species, Adoxophyes orana Fischer von Rósslerstamm (summer fruit tortrix moth); Cochylis hospes Walsingham (banded sunflower moth); Cydia latiferreana Walsingham (filbertworm); C. pomonella Linnaeus (coding moth); Platynota flavedana Clemens (variegated leafroller); P. stutana Walsingham (omnivorous leafroller); Lobesia botrana Denis & Schiffermüller (European grape vine moth); Spilonota ocellana Denis & Schiffermüller (eyespotted bud moth); Endopiza viteana Clemens (grape berry moth); Eupoecilia ambiguella Hübner (vine moth); Bonagota salubricola Meyrick (Brazilian apple leafroller); Grapholita molesta Busck (oriental fruit moth); Suleima helianthana Riley (sunflower bud moth); Argyrotaenia spp.; Choristoneura spp.

[0341] Selected other agronomic pests in the order Lepidoptera include, but are not limited to, Alsophila pometaria Harris (fall cankerworm); Anarsia lineatella Zeller (peach twig borer); Anisota senatoria J. E. Smith (orange striped oakworm); Antheraea pernyi Guérin-Méneville (Chinese Oak Tussah Moth); Bombyx mori Linnaeus (Silkworm); Bucculatrix thurberiella Busck (cotton leaf perforator); Colias eurytheme Boisduval (alfalfa caterpillar); Datana integerrima Grote & Robinson (walnut caterpillar); Dendrolimus sibiricus Tschetwerikov (Siberian silk moth), Ennomos subsignaria Hübner (elm spanworm); Erannis tiliaria Harris (linden looper); Euproctis chrysorrhoea Linnaeus (browntail moth); Harrisina americana Guérin-Méneville (grapeleaf skeletonizer); Hemileuca oiviae Cockrell (range caterpillar); Hyphantria cunea Drury (fall webworm); Keiferia lycopersicella Walsingham (tomato pinworm); Lambdina fiscellaria fiscellaria Hulst (Eastern hemlock looper); L. fscellaria lugubrosa Hulst (Western hemlock looper); Leucoma salicis Linnaeus (satin moth); Lymantria dispar Linnaeus (gypsy moth); Manduca quinquemaculata Haworth (five spotted hawk moth, tomato hornworm); M. sexta Haworth (tomato hornworm, tobacco hornworm); Operophtera brumata Linnaeus (winter moth); Paleacrita vemata Peck (spring cankerworm); Papilio cresphontes Cramer (giant swallowtail orange dog); Phryganidia californica Packard (California oakworm); Phyllocnistis citrella Stainton (citrus leafminer); Phyllonorycter blancardella Fabricius (spotted tentiform leafminer); Pieris brassicae Linnaeus (large white butterfly); P. rapae Linnaeus (small white butterfly); P. napi Linnaeus (green veined white butterfly); Platyptilia carduidactyla Riley (artichoke plume moth); Plutella xyostella Linnaeus (diamondback moth); Pectinophora gossypiella Saunders (pink bollworm); Pontia protodice Boisduval and Leconte (Southern cabbageworm); Sabulodes aegrotata Guenée (omnivorous looper); Schizura concinna J. E. Smith (red humped caterpillar); Sitotroga cerealella Olivier (Angoumois grain moth); Thaumetopoea pityocampa Schiffermuller (pine processionary caterpillar); Tineola bisselliella Hummel (webbing clothesmoth); Tuta absoluta Meyrick (tomato leafminer); Yponomeuta padella Linnaeus (ermine moth); Heliothis subflexa Guenée; Malacosoma spp. and Orgyia spp.

[0342] Of interest are larvae and adults of the order Lepidoptera, Family Noctuidae, Subfamily Heliothinae. The Heliothinae subfamily includes the following genera: Adisura, Aedophron, Australothis, Baptarma, Chazaria, Derrima, Eutricopis, Hebdomochondra, Helicoverpa, Heliocheilus, Heliolonche, Heliothis, Heliothodes, Melaporphyria, Micriantha, Microhelia, Periphanes, Protadisura, Psectrotarsia, Pyroceptria, Pyrrhia, Rhodoecia, Schinia, and Stenoecia.

[0343] Of interest are larvae and adults of the order Coleoptera including weevils from the families Anthribidae, Bruchidae and Curculionidae (including, but not limited to: Anthonomus grandis Boheman (boll weevil); Lissorhoptrus oryzophilus Kuschel (rice water weevil); Sitophilus granarius Linnaeus (granary weevil); S. oryzae Linnaeus (rice weevil); Hypera punctata Fabricius (clover leaf weevil); Cylindrocopturus adspersus LeConte (sunflower stem weevil); Smicronyx fulvus LeConte (red sunflower seed weevil); S. sodidus LeConte (gray sunflower seed weevil); Sphenophorus maidis Chittenden (maize billbug)); flea beetles, cucumber beetles, rootworms, leaf beetles, potato beetles and leafminers in the family Chrysomelidae (including, but not limited to: Leptinotarsa decemlineata Say (Colorado potato beetle); Diabrotic virgifera virgifera LeConte (western corn rootworm); D. barber Smith and Lawrence (northern corn rootworm); D. undecimpunctata howardi Barber (southern corn rootworm); Chaetocnema pulicara Mesheimer (corn flea beetle); Phyllotreta cruciferae Goeze (Crucifer flea beetle); Phyllotteta striolata (stripped flea beetle); Colaspis brunnea Fabricius (grape colaspis); Oulema melanopus Linnaeus (cereal leaf beetle); Zygogramma exclamationis Fabricius (sunflower beetle)); beetles from the family Coccinellidae (including, but not limited to: Epilachna varivestis Mulsant (Mexican bean beetle)); chafers and other beetles from the family Scarabaeidae (including, but not limited to: Popillia japonica Newman (Japanese beetle); Cyclocephala borealis Arrow (northern masked chafer, white grub); C. immaculata Olivier (southern masked chafer, white grub); Rhizotrogus majalis Razoumowsky (European chafer); Phyllophaga crinita Burmeister (white grub); Ligyrus gibbosus De Geer (carrot beetle)); carpet beetles from the family Dermestidae; wireworms from the family Elateridae, Eleodes spp., Melanotus spp.; Conoderus spp.; Limonius spp.; Agrotes spp.; Ctenicera spp.; Aeolus spp.; bark beetles from the family Scolytidae and beetles from the family Tenebrionidae.

[0344] Adults and immatures of the order Diptera are of interest, including leafminers Agromyza parvicomis Loew (corn blotch leafminer); midges (including, but not limited to: Contarinia sorghicola Coquillett (sorghum midge); Mayetiola destructor Say (Hessian fly); Sitodiplosis mosellana Géhin (wheat midge); Neolasioptera murtfeldtiana Felt, (sunflower seed midge)); fruit flies (Tephritidae), Oscinella frit Linnaeus (fruit flies); maggots (including, but not limited to: Delia platura Meigen (seedcom maggot); D. coarctata Fallen (wheat bulb fly) and other Delia spp., Meromyza ameicana Fitch (wheat stem maggot); Musca domestica Linnaeus (house flies); Fannia canicularis Linnaeus, F. femoralis Stein (lesser house flies); Stomoxys calcitrans Linnaeus (stable flies)); face flies, horn flies, blow flies, Chrysomya spp.; Phormia spp. and other muscoid fly pests, horse flies Tabanus spp.; bot flies Gastrophilus spp.; Oestrus spp.; cattle grubs Hypoderma spp.; deer flies Chrysops spp.; Melophagus ovinus Linnaeus (keds) and other Brachycera, mosquitoes Aedes spp.; Anopheles spp.; Culex spp.; black flies Prosimulium spp.; Simulium spp.; biting midges, sand flies, sciarids, and other Nematocera.

[0345] Included as insects of interest are adults and nymphs of the orders Hemiptera and Homoptera such as, but not limited to, adelgids from the family Adelgidae, plant bugs from the family Miridae, cicadas from the family Cicadidae, leafhoppers, Empoasca spp.; from the family Cicadellidae, planthoppers from the families Cixiidae, Flatidae, Fulgoroidea, Issidae and Delphacidae, treehoppers from the family Membracidae, psyllids from the family Psyllidae, whiteflies from the family Aleyrodidae, aphids from the family Aphididae, phylloxera from the family Phylloxeridae, mealybugs from the family Pseudococcidae, scales from the families Asterolecanidae, Coccidae, Dactylopiidae, Diaspididae, Eriococcidae Ortheziidae, Phoenicococcidae and Margarodidae, lace bugs from the family Tingidae, stink bugs from the family Pentatomidae, cinch bugs, Blissus spp.; and other seed bugs from the family Lygaeidae, spittiebugs from the family Cercopidae squash bugs from the family Coreidae and red bugs and cotton stainers from the family Pyrrhocoridae.

[0346] Agronomically important members from the order Homoptera further include, but are not limited to: Acyrthisiphon pisum Harris (pea aphid); Aphis craccivora Koch (cowpea aphid); A. fabae Scopoli (black bean aphid); A. gossypii Glover (cotton aphid, melon aphid); A. maidiradicis Forbes (corn root aphid); A. pomi De Geer (apple aphid); A. spiraecola Patch (spirea aphid); Aulacorthum solani Kaltenbach (foxglove aphid); Chaetosiphon fragaefolii Cockerell (strawberry aphid); Diuraphis noxia Kurdjumov/Mordvilko (Russian wheat aphid); Dysaphis plantaginea Paaserini (rosy apple aphid); Eriosoma lanigerum Hausmann (woolly apple aphid); Brevicoryne brassicae Linnaeus (cabbage aphid); Hyaopterus pruni Geoffroy (mealy plum aphid); Lipaphis erysimi Kaltenbach (tumip aphid); Metopolophium dirrhodum Walker (cereal aphid); Macrosiphum euphorbiae Thomas (potato aphid); Myzus persicae Sulzer (peach-potato aphid, green peach aphid); Nasonovia ribisnigri Mosley (lettuce aphid); Pemphigus spp. (root aphids and gall aphids); Rhopaosiphum maidis Fitch (corn leaf aphid); R. padi Linnaeus (bird cherry-oat aphid); Schizaphis graminum Rondani (greenbug); Sipha flava Forbes (yellow sugarcane aphid); Sitobion avenae Fabricius (English grain aphid); Therioaphis maculata Buckton (spotted alfalfa aphid); Toxoptera aurantii Boyer de Fonscolombe (black citrus aphid) and T. citricida Kirkaldy (brown citrus aphid); Adelges spp. (adelgids); Phylloxera devastatrix Pergande (pecan phylloxera); Bemisia tabaci Gennadius (tobacco whitefly, sweetpotato whitefly); B. argentifolii Bellows & Perring (silverleaf whitefly); Dialeurodes citri Ashmead (citrus whitefly); Trialeurodes abutiloneus (bandedwinged whitefly) and T. vaporariorum Westwood (greenhouse whitefly); Empoasca fabae Harris (potato leafhopper); Laodelphax striatellus Fallen (smaller brown planthopper); Macrolestes quadrilineatus Forbes (aster leafhopper); Nephotettix cinticeps Uhler (green leafhopper); N. nigropictus Stål (rice leafhopper); Nilaparvata lugens Stål (brown planthopper); Peregrinus maidis Ashmead (corn planthopper); Sogatella furcifera Horvath (white-backed planthopper); Sogatodes orizicola Muir (rice delphacid); Typhiocyba pomaria McAtee (white apple leafhopper); Erythroneoura spp. (grape leafhoppers); Magicicada septendecim Linnaeus (periodical cicada); Icerya purchasi Maskell (cottony cushion scale); Quadraspidiotus perniciosus Comstock (San Jose scale); Planococcus citri Risso (citrus mealybug); Pseudococcus spp. (other mealybug complex); Cacopsylla pyricola Foerster (pear psylla); Trioza diospyri Ashmead (persimmon psylla).

[0347] Agronomically important species of interest from the order Hemiptera include, but are not limited to: Acrosternum hilare Say (green stink bug); Anasa tristis De Geer (squash bug); Blissus leucopterus leucopterus Say (chinch bug); Corythuca gossypii Fabricius (cotton lace bug); Cyrtopeltis modesta Distant (tomato bug); Dysdercus suturellus Herrich-Schäffer (cotton stainer); Euschistus servus Say (brown stink bug); E. varolarus Palisot de Beauvois (one-spotted stink bug); Graptostethus spp. (complex of seed bugs); Leptoglossus corculus Say (leaf-footed pine seed bug); Lygus lineolars Palisot de Beauvois (tarnished plant bug); L. Hesperus Knight (Western tarnished plant bug); L. pratensis Linnaeus (common meadow bug); L. rugulipennis Poppius (European tarnished plant bug); Lygocoris pabulinus Linnaeus (common green capsid); Nezara viridula Linnaeus (southern green stink bug); Oebalus pugnax Fabricius (rice stink bug); Oncopeltus fasciatus Dallas (large milkweed bug); Pseudatomoscelis seriatus Reuter (cotton fleahopper).

[0348] Furthermore, embodiments may be effective against Hemiptera such, Calocoris norvegicus Gmelin (strawberry bug); Orthops campestris Linnaeus; Plesiocoris rugicollis Fallen (apple capsid); Cyrtopeltis modestus Distant (tomato bug); Cyrtopeltis notatus Distant (suckfly); Spanagonicus albofasciatus Reuter (whitemarked fleahopper); Diaphnocoris chloronis Say (honeylocust plant bug); Labopidicola allii Knight (onion plant bug); Pseudatomoscelis seriatus Reuter (cotton fleahopper); Adelphocoris rapidus Say (rapid plant bug); Poecilocapsus lineatus Fabricius (four-lined plant bug); Nysius ericae Schilling (false chinch bug); Nysius raphanus Howard (false chinch bug); Nezara viridula Linnaeus (Southern green stink bug); Eurygaster spp.; Coreidae spp.; Pyrrhocoridae spp.; Tinidae spp.; Blostomatidae spp.; Reduviidae spp. and Cimicidae spp.

[0349] Also included are adults and larvae of the order Acari (mites) such as Aceria tosichella Keifer (wheat curl mite); Petrobia latens Müller (brown wheat mite); spider mites and red mites in the family Tetranychidae, Panonychus ulmi Koch (European red mite); Tetranychus urticae Koch (two spotted spider mite); (T. mcdanieli McGregor (McDaniel mite); T. cinnabarinus Boisduval (carmine spider mite); T. turkestani Ugarov & Nikolski (strawberry spider mite); flat mites in the family Tenuipalpidae, Brevipalpus lewisi McGregor (citrus flat mite); rust and bud mites in the family Eriophyidae and other foliar feeding mites and mites important in human and animal health, i.e., dust mites in the family Epidermoptidae, follicle mites in the family Demodicidae, grain mites in the family Glycyphagidae, ticks in the order Ixodidae. Ixodes scapularis Say (deer tick); I. holocyclus Neumann (Australian paralysis tick); Dermacentor variabilis Say (American dog tick); Amblyomma americanum Linnaeus (lone star tick) and scab and itch mites in the families Psoroptidae, Pyemotidae and Sarcoptidae.

[0350] Insect pests of the order Thysanura are of interest, such as Lepisma saccharina Linnaeus (silverfish); Thermobia domestica Packard (firebrat).

[0351] Additional arthropod pests covered include: spiders in the order Araneae such as Loxosceles eclusa Gertsch and Mulaik (brown recluse spider) and the Latrodectus mactans Fabricius (black widow spider) and centipedes in the order Scutigeromorpha such as Scutigera coleoptrata Linnaeus (house centipede).

[0352] Insect pest of interest include the superfamily of stink bugs and other related insects including but not limited to species belonging to the family Pentatomidae (Nezara viridula, Halyomorpha halys, Piezodorus guildini, Euschistus servus, Acrosternum hilate, Euschistus heros, Euschistus tristigmus, Acrostemum hilare, Dichelops furcatus, Dichelops melacanthus, and Bagrada hilars (Bagrada Bug)), the family Plataspidae (Megacopta cribraria—Bean plataspid) and the family Cydnidae (Scaptocoris castanea—Root stink bug) and Lepidoptera species including but not limited to: diamond-back moth, e.g., Helicoverpa zea Boddie; soybean looper, e.g., Pseudoplusia includens Walker and velvet bean caterpillar e.g., Anticarsia gemmatalis Hübner.

[0353] Methods for measuring pesticidal activity are known. See, for example, Czapla and Lang, (1990) J. Econ. Entomol. 83:2480-2485; Andrews, et al., (1988) Biochem. J. 252:199-206; Marrone, et al., (1985) J. of Economic Entomology 78:290-293 and U.S. Pat. No. 5,743,477, all of which are herein incorporated by reference in their entirety. Generally, the protein is mixed and used in feeding assays. See, for example Marrone, et al., (1985) J. of Economic Entomology 78:290-293. Such assays can include contacting plants with one or more pests and determining the plant's ability to survive and/or cause the death of the pests.

[0354] Nematodes include parasitic nematodes such as root-knot, cyst and lesion nematodes, including Heterodera spp., Meloidogyne spp. and Globodera spp.; particularly members of the cyst nematodes, including, but not limited to, Heterodera glycines (soybean cyst nematode); Heterodera schachtii (beet cyst nematode); Heterodera avenae (cereal cyst nematode) and Globodera rostochiensis and Globodera pailida (potato cyst nematodes). Lesion nematodes include Pratylenchus spp.

### Seed Treatment

[0355] To protect and to enhance yield production and trait technologies, seed treatment options can provide additional crop plan flexibility and cost effective control against insects, weeds and diseases. Seed material can be treated, typically surface treated, with a composition comprising combinations of chemical or biological herbicides, herbicide safeners, insecticides, fungicides, germination inhibitors and enhancers, nutrients, plant growth regulators and activators, bactericides, nematocides, avicides and/or molluscicides. These compounds are typically formulated together with further carriers, surfactants or application-promoting adjuvants for formulation. The coatings may be applied by impregnating propagation material with a liquid formulation or by coating with a combined wet or dry formulation. Examples of the various types of compounds that may be used as seed treatments are provided in The Pesticide Manual: A World Compendium, C. D. S. Tomlin Ed., Published by the British Crop Production Council, which is hereby incorporated by reference.

[0356] Some seed treatments that may be used on crop seed include, but are not limited to, one or more of abscisic acid, acibenzolar-S-methyl, avermectin, amitrol, azaconazole, azospirillum, azadirachtin, azoxystrobin, Bacillus spp. (including one or more of cereus, firmus, megaterium, pumilis, sphaericus, subtilis and/or thuringiensis species), bradyrhizobium spp. (including one or more of betae, canariense, elkanii, iriomotense, japonicum, liaonigense, pachyrhizi and/or yuanmingense), captan, carboxin, chitosan, clothianidin, copper, cyazypyr, difenoconazole, etidiazole, fipronil, fludioxonil, fluoxastrobin, fluquinconazole, flurazole, fluxofenim, harpin protein, imazalil, imidacloprid, ipconazole, isoflavenoids, lipo-chitooligosaccharide, mancozeb, manganese, maneb, mefenoxam, metalaxyl, metconazole, myclobutanil, PCNB, penflufen, penicillium, penthiopyrad, permethrine, picoxystrobin, prothioconazole, pyraclostrobin, rynaxypyr, S-metolachlor, saponin, sedaxane, TCMTB, tebuconazole, thiabendazole, thiamethoxam, thiocarb, thiram, tolclofos-methyl, triadimenol, trichoderma, trifloxystrobin, triticonazole and/or zinc. PCNB seed coat refers to EPA Registration Number 00293500419, containing quintozen and terrazole. TCMTB refers to 2-(thiocyanomethylthio) benzothiazole.

[0357] Seed varieties and seeds with specific transgenic traits may be tested to determine which seed treatment options and application rates may complement such varieties and transgenic traits to enhance yield. For example, a variety with good yield potential but head smut susceptibility may benefit from the use of a seed treatment that provides protection against head smut, a variety with good yield potential but cyst nematode susceptibility may benefit from the use of a seed treatment that provides protection against cyst nematode, and so on. Likewise, a variety encompassing a transgenic trait conferring insect resistance may benefit from the second mode of action conferred by the seed treatment, a variety encompassing a transgenic trait conferring herbicide resistance may benefit from a seed treatment with a safener that enhances the plants resistance to that herbicide, etc. Further, the good root establishment and early emergence that results from the proper use of a seed treatment may result in more efficient nitrogen use, a better ability to withstand drought and an overall increase in yield potential of a variety or varieties containing a certain trait when combined with a seed treatment.

### Methods for Killing an Insect Pest and Controlling an Insect Population

[0358] In some embodiments, methods are provided for protecting a plant from an insect pest, comprising expressing in the plant or cell thereof a polynucleotide encoding an IPD103 polypeptide and one or more polynucleotide selected from: a polynucleotide encoding a PtlP-83 polypeptide having insecticidal activity; a polynucleotide encoding a Cry1B polypeptide having insecticidal activity; a polynucleotide encoding a variant Cry1B polypeptide having insecticidal activity; a polynucleotide encoding a Cry1C polypeptide having insecticidal activity; a polynucleotide encoding a Cry1D polypeptide having insecticidal activity; and a polynucleotide encoding a Cry1J polypeptide having insecticidal activity.

[0359] In some embodiments, methods are provided for protecting a plant from Heliothinae pest species. In some embodiments, the Heliothinae pest species are selected from velvetbean caterpillar (VBC) Anticarsia gemmatalis, soybean looper (SBL) Pseudoplusia includens, corn earworm (CEW) Heliothis zea, tobacco budworm (TBW) Heliothis virescens, cotton bollworm (CBW) Helicoverpa zea, fall armyworm (FAW) Spodoptera frugiperda, and southern armyworm (SAW) Spodoptera eridania.

### Insect Resistance Management (IRM) Strategies

[0360] Expression of B. thuringiensis δ-endotoxins in transgenic corn plants has proven to be an effective means of controlling agriculturally important insect pests (Perlak, et al., 1990; 1993). However, insects have evolved that are resistant to B. thuringiensis δ-endotoxins expressed in transgenic plants. Such resistance, should it become widespread, would clearly limit the commercial value of germplasm containing genes encoding such B. thuringiensis δ-endotoxins.

[0361] One way to increasing the effectiveness of the transgenic insecticides against target pests and contemporaneously reducing the development of insecticide-resistant pests is to use provide non-transgenic (i.e., non-insecticidal protein) refuges (a section of non-insecticidal crops/corn) for use with transgenic crops producing a single insecticidal protein active against target pests. The United States Environmental Protection Agency (epa.gov/oppbppdl/biopesticides/pips/bt_corn_refuge_2006.htm, which can be accessed using the www prefix) publishes the requirements for use with transgenic crops producing a single Bt protein active against target pests. In addition, the National Corn Growers Association, on their website: (ncga.com/insect-resistance-management-fact-sheet-bt-corn, which can be accessed using the www prefix) also provides similar guidance regarding refuge requirements. Due to losses to insects within the refuge area, larger refuges may reduce overall yield.

[0362] Another way of increasing the effectiveness of the transgenic insecticides against target pests and contemporaneously reducing the development of insecticide-resistant pests would be to have a repository of insecticidal genes that are effective against groups of insect pests and which manifest their effects through different modes of action.

[0363] Expression in a plant of two or more insecticidal compositions toxic to the same insect species, each insecticide being expressed at efficacious levels would be another way to achieve control of the development of resistance. This is based on the principle that evolution of resistance against two separate modes of action is far more unlikely than only one. Roush, for example, outlines two-toxin strategies, also called “pyramiding” or “stacking,” for management of insecticidal transgenic crops. (The Royal Society. Phil. Trans. R. Soc. Lond. B. (1998) 353:1777-1786). Stacking or pyramiding of two different proteins each effective against the target pests and with little or no cross-resistance can allow for use of a smaller refuge. The US Environmental Protection Agency requires significantly less (generally 5%) structured refuge of non-Bt corn be planted than for single trait products (generally 20%). There are various ways of providing the IRM effects of a refuge, including various geometric planting patterns in the fields and in-bag seed mixtures, as discussed further by Roush.

[0364] In some embodiments, the transgene stacks of the disclosure are useful as an insect resistance management strategy in combination (i.e., pyramided) with other pesticidal proteins include but are not limited to Bt toxins, Xenorhabdus sp. or Photorhabdus sp. insecticidal proteins, other insecticidally active proteins, and the like.

[0365] Provided are methods of controlling Lepidoptera and/or Coleoptera insect infestation(s) in a transgenic plant that promote insect resistance management, comprising expressing in the plant at least two different insecticidal proteins having different modes of action.

[0366] In some embodiments, the methods of controlling Lepidoptera and/or Coleoptera insect infestation in a transgenic plant and promoting insect resistance management comprises the presentation of at least one of the IPD103 polypeptide insecticidal protein and one or more polypeptide selected from: a PtlP-83 polypeptide having insecticidal activity; a Cry1B polypeptide having insecticidal activity; a variant Cry1B polypeptide having insecticidal activity; a Cry1C polypeptide having insecticidal activity; a Cry1D polypeptide having insecticidal activity; and a Cry1J polypeptide having insecticidal activity.

[0367] Also provided are methods of reducing likelihood of emergence of Lepidoptera and/or Coleoptera insect resistance to transgenic plants expressing in the plants insecticidal proteins to control the insect species, comprising expression of an IPD103 polypeptide insecticidal to the insect species in combination with a second insecticidal protein to the insect species having different modes of action.

[0368] Also provided are means for effective Lepidoptera and/or Coleoptera insect resistance management of transgenic plants, comprising co-expressing at high levels in the plants two or more insecticidal proteins toxic to Lepidoptera and/or Coleoptera insects but each exhibiting a different mode of effectuating its killing activity, wherein the two or more insecticidal proteins comprise an IPD103 polypeptide and a Cry protein. Also provided are means for effective Lepidoptera and/or Coleoptera insect resistance management of transgenic plants, comprising co-expressing at high levels in the plants two or more insecticidal proteins toxic to Lepidoptera and/or Coleoptera insects but each exhibiting a different mode of effectuating its killing activity. In addition, methods are provided for obtaining regulatory approval for planting or commercialization of plants expressing proteins insecticidal to insects in the order Lepidoptera and/or Coleoptera, comprising the step of referring to, submitting or relying on insect assay binding data showing that the IPD103 polypeptide does not compete with binding sites for Cry proteins in such insects.

[0369] In some embodiments, the molecular stacks, breeding stacks and methods of the disclosure are useful for killing Heliothinae pests or controlling Heliothinae pest populations. In some embodiments, the Heliothinae pest is selected from velvetbean caterpillar (VBC) Anticarsia gemmatalis, soybean looper (SBL) Pseudopusia includens, corn earworm (CEW) Heliothis zea, tobacco budworm (TBW) Heliothis virescens, cotton bollworm (CBW) Helicoverpa zea, fall armyworm (FAW) Spodoptera frugiperda, and southern armyworm (SAW) Spodoptera eridania.

### Methods for Increasing Plant Yield

[0370] Methods for increasing plant yield are provided. The methods comprise providing a plant or plant cell expressing a polynucleotide encoding the pesticidal polypeptide sequence disclosed herein and growing the plant or a seed thereof in a field infested with a pest against which the polypeptide has pesticidal activity. In some embodiments, the polypeptide has pesticidal activity against a Lepidopteran, Coleopteran, Dipteran, Hemipteran or nematode pest, and the field is infested with a Lepidopteran, Hemipteran, Coleopteran, Dipteran or nematode pest.

[0371] As defined herein, the “yield” of the plant refers to the quality and/or quantity of biomass produced by the plant. “Biomass” as used herein refers to any measured plant product. An increase in biomass production is any improvement in the yield of the measured plant product. Increasing plant yield has several commercial applications. For example, increasing plant leaf biomass may increase the yield of leafy vegetables for human or animal consumption. Additionally, increasing leaf biomass can be used to increase production of plant-derived pharmaceutical or industrial products. An increase in yield can comprise any statistically significant increase including, but not limited to, at least a 1% increase, at least a 3% increase, at least a 5% increase, at least a 10% increase, at least a 20% increase, at least a 30%, at least a 50%, at least a 70%, at least a 100% or a greater increase in yield compared to a plant not expressing the pesticidal sequence.

[0372] In specific methods, plant yield is increased as a result of improved pest resistance of a plant expressing an IPD103 polypeptide and one or more pesticidal polypeptides selected from a PtlP-83 polypeptide having insecticidal activity; a Cry1B polypeptide having insecticidal activity; a variant Cry1B polypeptide having insecticidal activity; a Cry1C polypeptide having insecticidal activity; a Cry1D polypeptide having insecticidal activity; and a Cry1J polypeptide having insecticidal activity. Expression of the pesticidal polypeptides results in a reduced ability of a pest to infest or feed on the plant, thus improving plant yield.

[0373] The following examples are offered by way of illustration and not by way of limitation.

### EXPERIMENTALS

### Example 1—Identification of Insecticidal Proteins Active Against Corn Earworm, European Corn Borer Fall Armyworm, Soybean Looper, and Velvet Bean Caterpillar from the Fern, Athyrium niponicum ‘Red Beauty’

[0374] An insecticidal protein, IPD103Aa (SEQ ID NO: 2), was identified by protein purification, mass spectroscopy (MS) and PCR cloning from the commercial cultivar Athyrium niponicum ‘Red Beauty’, designated herein as NY15. Insecticidal activity against lepidopteran pests was observed from a protein extract from Athyrium niponicum, ‘Red Beauty’ with an artificial diet-based assay.

[0375] NY15 plant material was flash frozen in liquid nitrogen and stored at −80° C. The frozen sample was removed from storage and ground to a fine powder at liquid nitrogen temperatures with a GenoGrinder® 2010 (SPEX SamplePrep®, Metuchen, N.J.). To extract protein, 5 mL Extraction Buffer (50 mM Tris, pH 8.0, 150 mM Potassium Chloride, 2.5 mM EDTA, 1.5% Polyvinylpolypyridone and “Complete, EDTA-free” protease inhibitor cocktail (Roche, Indianapolis, Ind.) was added per gram of fresh weight of NY15. The extracted material was clarified by centrifugation at 20,000 g for 10 min. The remaining cell pellet was re-extracted with ½ the volume of Extraction Buffer, centrifuged and the supematants combined, filtered and desalted into 20 mM Tris, pH 8, using a Sephadex™ G25 (GE Healthcare, Piscataway, N.J.) column and concentrated on 10 kDa molecular weight cutoff centrifugal concentrators (Sartorius Stedim, Goettingen, Germany).

[0376] Bioassays against Soybean Looper (SBL) (Pseudoplusia includens), Corn Earworm (CEW) (Helicoverpa zea) and European Corn Borer (ECB) (Ostrinia nubialis) were conducted using the desalted protein extract overlaid onto agar based Lepidoptera diet (Southland Products Inc., Lake Village, Ark.) in 96-well format The sample was allowed to dry on top of the diet. A variable number of neonate insects (2-5) were placed individually into each well of the treated plate. The assay was run for four days at 27° C. and then scored for insect mortality, and various stages of stunting of insect growth. The scores were recorded numerically as dead (3), severely stunted (2) (little or no growth but alive and equivalent to a 1^{st} instar larvae), stunted (1) (growth to second instar but not equivalent to controls), or normal (0). The crude NY15 extract scored 1 against CEW in each of 4 replicates of the diet-based assay.

[0377] For protein purification, extract of NY15 was generated as described above and the supernatant desalted into 20 mM Tris, pH 8, before loading onto a 15 mL Capto™ Q column (GE Healthcare) that was equilibrated in the same buffer. A linear 10 column volume gradient from 0 M to 0.3 M NaCl in 50 mM Tris, pH 8.0 was applied. Eluted 1 mL fractions were assayed against CEW in the bioassay described above. Activity against CEW was detected in fractions eluting at ˜7 to 11 mS/cm conductivity. These fractions were pooled and desalted into 20 mM Tris, pH 8.7 and loaded onto a 1 ml Mono Q™ column (GE Healthcare) equilibrated in the same buffer. A linear 20 CV gradient to 40% Elution Buffer (20 mM Tris+0.35 M NaCl, pH 8.7) was applied and 1 mL fractions were collected. Activity against CEW was detected in fractions eluting at ˜8.5-13.3 mS/cm² conductivity. Active fractions were pooled and desalted into 25 mM BisTris, pH 7.2 and loaded on a 4 mL Mono P™ column (GE Healthcare). An isocratic gradient of 100% Polybuffer 74 was applied and 1 mL eluate fractions assayed against CEW. The fractions were submitted directly as well as after concentrating with 10 kDa MWCO units. There were three regions of activity associated with the Mono P™ run, where Mono P™ fractions C2-3, C7-8 and D12 all showed activity against CEW. The first two regions were active at 1× and 4× concentration while fraction D12 showed activity only after 4× concentration. Denaturing electrophoresis of the Mono P™ fractions on LDS polyacrylamide gels indicated that the abundance of a protein band at approximately 20 kDa correlated directly with the three regions of eluted CEW activity.

[0378] Protein sequencing and identification were performed by MS analysis after protein digestion. Proteins for MS identification were obtained from running sample on an LDS-PAGE gel stained with Coomassie™ Brilliant Blue G-250 stain. The bands of interest were excised from the gel, de-stained, reduced with dithiothreitol and then alkylated with iodoacetamide. Following overnight digestion with trypsin, the samples were subjected to nano-liquid chromatography/electrospray tandem mass spectrometry (nano-LC/ESI-MS/MS) on a Thermo Q Exactive™ Orbitrap™ mass spectrometer (Thermo Fisher Scientific®, 81 Wyman Street, Waltham, Mass. 02454) interfaced with an Eksigent™ NanoLC™ Ultra 1-D Plus nano-Ic system (AB Sciex™, 500 Old Connecticut Path, Framingham, Mass. 01701). Protein identification was done by database searches using Mascot® (Matrix Science, 10 Perrins Lane, London NW31QY UK). The searches were conducted against an in-house transcriptome database containing transcripts from the Athyrium niponicum ‘Red Beauty’, NY15 source plant and the public protein database Swiss-Prot using the Mascot search engine (Matrix Science). The amino acid sequences for all three gel bands aligned with the predicted protein from a NY15.

### Example 2—Transcriptomic Sequencing of Athyrium niponicum ‘Red Beauty’ and Cloning of IPD103Aa

[0379] A transcriptome for Athyrium niponicum ‘Red Beauty’ (NY15) was prepared as follows. Total RNA was isolated from frozen tissues with an RNeasy® kit (Qiagen®). Sequencing libraries from the resulting total RNAs were prepared using the TruSeq™ mRNA-Seq kit and protocol from Illumina®, Inc. (San Diego, Calif.). Briefly, mRNAs were isolated via attachment to oligo(dT) beads, fragmented to a mean size of 180 nt, reverse transcribed into cDNA by random hexamer prime, end repaired, 3′A-tailed, and ligated with Illumina® indexed TruSeq™ adapters. Ligated cDNA fragments were PCR amplified using Illumina® TruSeq™ primers and purified PCR products were checked for quality and quantity on the Agilent Bioanalyzer® DNA 7500 chip. Post quality and quantity assessment, 100 ng of the transcript library was normalized by treatment with Duplex Specific Nuclease (DSN) (Evrogen®, Moscow, Russia). Normalization was accomplished by addition of 200 mM Hepes buffer, followed by heat denaturation and five hour anneal at 68° C. Annealed library was treated with 2 μl of DSN enzyme for 25 minutes, purified by Qiagen® MinElute® columns according to manufacturer protocols, and amplified twelve cycles using Illumina® adapter specific primers. Final products were purified with Ampure® XP beads (Beckman Genomics, Danvers, Mass.) and checked for quality and quantity on the Agilent Bioanalyzer® DNA 7500 chip.

[0380] Normalized transcript libraries were sequenced according to manufacturer protocols on the Illumina® HiSeq® 2500. Libraries were pooled, hybridized and sequenced three per flowcell lane using onboard clustering methods followed by sequencing to a target depth of sixty million 75 bp paired end reads per normalized library.

[0381] Peptide sequences identified for IPD103Aa (SEQ ID NO: 2) by LCMS sequencing were searched against protein sequences predicted by open reading frames (ORFs) from the transcriptome assemblies for NY15. The peptides gave a perfect match to a transcript corresponding to IPD103Aa (SEQ ID NO: 2). The coding sequence was used to design primers to clone the IPD103Aa polynucleotide sequence (SEQ ID NO: 1). This clone was produced by polymerase chain reaction using the Kappa HiFi™ polymerase (Kapa Bioscience, Wilmington, Mass.) and the cDNA prepared from the total RNA from Athyrium niponicum‘Red Beauty’ using the SuperScript®II kit (Thermo Fischer Scientific, Waltham, Mass.) as the template. PCR products were gel purified, digested with NdeI and XhoI restriction enzymes (New England Biolabs) and ligated into pET14b (Novagen®) also digested with the same enzymes. Colonies were sequenced to confirm the clone.

### Example 3—Purification of IPD103Aa Expressed in E. coli

[0382] The polynucleotide of SEQ ID NO: 1, encoding IPD103Aa (SEQ ID NO: 2) was subcloned into the pET14b vector (Novagen®) using the NdeI/XhoI restriction sites in frame with the coding sequence for an N-terminal 6×His tag followed by a thrombin cleavage site. Chemically competent OverExpress® C41(DE3) SOLOs cells (Lucigen®) were transformed with pET plasmid DNA, containing the IPD103Aa gene for recombinant protein expression. The transformed E. coli cells were grown overnight at 37° C. with ampicillin selection and then inoculated to a fresh 2×YT medium (1:25) and further grown to an optical density of about 0.8. Protein expression was induced by adding 0.3 mM IPTG and cells were further grown at 16° C. for 16 hours. The E. coli expressed proteins were purified by immobilized metal ion chromatography using HisPur™ Cobalt resin (Clonetech, Mountain View, Calif.) according to the manufacturer's protocols. The purified fractions were desalted using PD-10 columns (GE Life Sciences, Pittsburgh, USA) pre-equilibrated with PBS buffer. The eluted protein was used in diet bioassays to evaluate the protein activity on larvae of a diversity of Lepidoptera.

### Example 4—Identification of IPD103Aa Homologs and their Purification after Expression in E. coli

[0383] Gene identities may be determined by conducting BLAST™ (Basic Local Alignment Search Tool; Altschul, et al., (1993) J. Mol. Biol. 215:403-410; see also ncbi.nlm.nih.gov/BLAST/, which can be accessed using the www prefix) searches under default parameters for similarity to sequences. The polynucleotide sequence for IPD103Aa (SEQ ID NO: 1) was analyzed. Gene identities conducted by BLAST™ in a DUPONT PIONEER internal plant transcriptomes database identified multiple homologs of IPD103Aa protein (SEQ ID NO: 2). The IPD103Aa homologs and the organism they were identified from are shown in Table 1.

TABLE 1

| Gene Name | Source | Organism | DNA Seq | AA Seq |
|---|---|---|---|---|
| IPD103Aa | NY15 | Athyrium niponicum ‘Red Beauty’ | SEQ ID NO: 1 | SEQ ID NO: 2 |
| IPD103Ab | NY15 | Athyrium niponicum ‘Red Beauty’ | SEQ ID NO: 3 | SEQ ID NO: 4 |
| IPD103Ac | PS9092AF | Platycerium wandae | SEQ ID NO: 5 | SEQ ID NO: 6 |
| IPD103Ad | PS12349 | Pteris ensiformis ‘Evergemiensis’ | SEQ ID NO: 7 | SEQ ID NO: 8 |
| IPD103Ae | PS12349 | Pteris ensiformis ‘Evergemiensis’ | SEQ ID NO: 9 | SEQ ID NO: 10 |
| IPD103Ba | PS9092AF | Platycerium wandae | SEQ ID NO: 11 | SEQ ID NO: 12 |
| IPD103Bb | PS9092AF | Platycerium wandae | SEQ ID NO: 13 | SEQ ID NO: 14 |
| IPD103Bc | PS12409 | Athyrium filix-femina | SEQ ID NO: 15 | SEQ ID NO: 16 |
| IPD103Bd | PS7897CF | Colysis wrightii | SEQ ID NO: 17 | SEQ ID NO: 18 |
| IPD103Be | PS8837CF | Nephrolepis falcata | SEQ ID NO: 19 | SEQ ID NO: 20 |
| IPD103Bf | PS11699 | Nephrolepis cordifolia | SEQ ID NO: 21 | SEQ ID NO: 22 |
| IPD103Bg | PS13327 | Polystichum tsus-simense | SEQ ID NO: 23 | SEQ ID NO: 24 |
| IPD103Bh | PS13327 | Polystichum tsus-simense | SEQ ID NO: 25 | SEQ ID NO: 26 |
| IPD103Bi | PS12861 | Thelypteris palustris | SEQ ID NO: 27 | SEQ ID NO: 28 |
| IPD103Bj | PS12410 | Athyrium filix-femina | SEQ ID NO: 29 | SEQ ID NO: 30 |
| IPD103Bk | PS12337 | Nephrolepis cordifolia | SEQ ID NO: 31 | SEQ ID NO: 32 |
| IPD103Ca | PS9092AF | Platycerium wandae | SEQ ID NO: 33 | SEQ ID NO: 34 |
| IPD103Da | PS9539 | Tectaria milnei | SEQ ID NO: 35 | SEQ ID NO: 36 |
| IPD103Db | PS12356 | Davallia tyermannii | SEQ ID NO: 37 | SEQ ID NO: 38 |

[0384] cDNAs were generated from source organisms with identified homologs from the internal database by reverse transcription from total RNA. Homologs were PCR amplified from their respective cDNA's using primers designed to the coding sequences of each homolog. The PCR products were digested with NdeI/XhoI (New England Biolabs, Ipswich, Mass.) and ligated into apET14b (Novagen) plasmid digested by the same enzymes. Cloned PCR products were confirmed by sequencing. The amino acid sequence identity of the IPD103Aa homologs as calculated using the Needleman-Wunsch algorithm, as implemented in the Needle program (EMBOSS tool suite) are shown in Table 2.

TABLE 2

| | IPD103Ab | IPD103Ac | IPD103Ad | IPD103Ae | IPD103Ba | IPD103Bb | IPD103Bc | IPD103Bd | IPD103Be |
|---|---|---|---|---|---|---|---|---|---|
| | SEQ ID | SEQ ID | SEQ ID | SEQ ID | SEQ ID | SEQ ID | SEQ ID | SEQ ID | SEQ ID |
| | NO: 4 | NO: 6 | NO: 8 | NO: 10 | NO: 12 | NO: 14 | NO: 16 | NO: 18 | NO: 20 |
| IPD103Aa | 98.8 | 98.3 | 93.6 | 93.6 | 82.0 | 86.6 | 89.5 | 93.0 | 85.5 |
| SEQ ID NO: 2 | | | | | | | | | |
| IPD103Ab | — | 98.8 | 94.7 | 94.7 | 81.4 | 86.0 | 89.0 | 94.2 | 86.0 |
| SEQ ID NO: 4 | | | | | | | | | |
| IPD103Ac | — | — | 93.6 | 93.6 | 82.5 | 87.2 | 88.4 | 93.0 | 86.0 |
| SEQ ID NO: 6 | | | | | | | | | |
| IPD103Ad | — | — | — | 99.4 | 78.6 | 83.0 | 86.0 | 92.9 | 83.0 |
| SEQ ID NO: 8 | | | | | | | | | |
| IPD103Ae | — | — | — | — | 78.6 | 83.0 | 86.5 | 92.9 | 83.6 |
| SEQ ID NO: 10 | | | | | | | | | |
| IPD103Ba | — | — | — | — | — | 92.9 | 79.7 | 83.5 | 82.5 |
| SEQ ID NO: 12 | | | | | | | | | |
| IPD103Bb | — | — | — | — | — | — | 84.2 | 87.7 | 86.6 |
| SEQ ID NO: 14 | | | | | | | | | |
| IPD103Bc | — | — | — | — | — | — | — | 86.0 | 84.3 |
| SEQ ID NO: 16 | | | | | | | | | |
| IPD103Bd | — | — | — | — | — | — | — | — | 87.7 |
| SEQ ID NO: 18 | | | | | | | | | |
| IPD103Be | — | — | — | — | — | — | — | — | — |
| SEQ ID NO: 20 | | | | | | | | | |
| IPD103Bf | — | — | — | — | — | — | — | — | — |
| SEQ ID NO: 22 | | | | | | | | | |
| IPD103Bg | — | — | — | — | — | — | — | — | — |
| SEQ ID NO: 24 | | | | | | | | | |
| IPD103Bh | — | — | — | — | — | — | — | — | — |
| SEQ ID NO: 26 | | | | | | | | | |
| IPD103Bi | — | — | — | — | — | — | — | — | — |
| SEQ ID NO: 28 | | | | | | | | | |
| IPD103Bj | — | — | — | — | — | — | — | — | — |
| SEQ ID NO: 30 | | | | | | | | | |
| IPD103Bk | — | — | — | — | — | — | — | — | — |
| SEQ ID NO: 32 | | | | | | | | | |
| IPD103Ca | — | — | — | — | — | — | — | — | — |
| SEQ ID NO: 34 | | | | | | | | | |
| IPD103Da | — | — | — | — | — | — | — | — | — |
| SEQ ID NO: 36 | | | | | | | | | |
| | IPD103Bf | IPD103Bg | IPD103Bh | IPD103Bi | IPD103Bj | IPD103Bk | IPD103Ca | IPD103Da | IPD103Db |
| | SEQ ID | SEQ ID | SEQ ID | SEQ ID | SEQ ID | SEQ ID | SEQ ID | SEQ ID | SEQ ID |
| | NO: 22 | NO: 24 | NO: 26 | NO: 28 | NO: 30 | NO: 32 | NO: 34 | NO: 36 | NO: 38 |
| IPD103Aa | 86.1 | 87.4 | 87.4 | 85.0 | 89.0 | 90.1 | 81.4 | 72.0 | 61.8 |
| SEQ ID NO: 2 | | | | | | | | | |
| IPD103Ab | 86.1 | 86.3 | 86.3 | 84.4 | 88.4 | 90.1 | 80.9 | 72.2 | 62.2 |
| SEQ ID NO: 4 | | | | | | | | | |
| IPD103Ac | 85.0 | 85.7 | 85.7 | 83.8 | 87.8 | 89.0 | 82.0 | 71.6 | 62.2 |
| SEQ ID NO: 6 | | | | | | | | | |
| IPD103Ad | 84.9 | 83.9 | 83.9 | 83.8 | 85.4 | 88.9 | 78.0 | 71.8 | 62.0 |
| SEQ ID NO: 8 | | | | | | | | | |
| IPD103Ae | 84.9 | 83.3 | 83.3 | 83.8 | 86.0 | 88.9 | 78.0 | 71.1 | 62.4 |
| SEQ ID NO: 10 | | | | | | | | | |
| IPD103Ba | 87.9 | 76.2 | 76.2 | 73.9 | 79.1 | 84.6 | 98.9 | 64.1 | 57.9 |
| SEQ ID NO: 12 | | | | | | | | | |
| IPD103Bb | 85.5 | 80.5 | 80.5 | 79.2 | 83.6 | 89.5 | 94.0 | 67.1 | 61.0 |
| SEQ ID NO: 14 | | | | | | | | | |
| IPD103Bc | 81.6 | 92.5 | 92.5 | 82.1 | 99.4 | 85.4 | 79.1 | 71.8 | 59.3 |
| SEQ ID NO: 16 | | | | | | | | | |
| IPD103Bd | 86.6 | 84.5 | 84.5 | 82.1 | 85.4 | 90.6 | 82.4 | 71.1 | 62.6 |
| SEQ ID NO: 18 | | | | | | | | | |
| IPD103Be | 85.6 | 81.1 | 81.1 | 77.6 | 83.7 | 89.5 | 81.4 | 69.9 | 59.9 |
| SEQ ID NO: 20 | | | | | | | | | |
| IPD103Bf | — | 79.7 | 79.7 | 77.3 | 81.0 | 95.5 | 87.4 | 67.4 | 61.7 |
| SEQ ID NO: 22 | | | | | | | | | |
| IPD103Bg | — | — | 99.4 | 80.6 | 93.1 | 83.3 | 75.7 | 71.5 | 58.1 |
| SEQ ID NO: 24 | | | | | | | | | |
| IPD103Bh | — | — | — | 80.6 | 93.1 | 83.3 | 75.7 | 71.5 | 58.1 |
| SEQ ID NO: 26 | | | | | | | | | |
| IPD103Bi | — | — | — | — | 81.5 | 84.8 | 78.6 | 71.3 | 58.7 |
| SEQ ID NO: 28 | | | | | | | | | |
| IPD103Bj | — | — | — | — | — | 84.8 | 78.6 | 71.3 | 58.7 |
| SEQ ID NO: 30 | | | | | | | | | |
| IPD103Bk | — | — | — | — | — | — | 84.1 | 70.5 | 64.5 |
| SEQ ID NO: 32 | | | | | | | | | |
| IPD103Ca | — | — | — | — | — | — | — | 63.0 | 57.4 |
| SEQ ID NO: 34 | | | | | | | | | |
| IPD103Da | — | — | — | — | — | — | — | — | 51.2 |
| SEQ ID NO: 36 | | | | | | | | | |

### Example 5—Lepidoptera Assays with Purified Tagged Proteins Expressed in E. coli

[0385] Bioassays against the five pest species, Corn earworm (CEW) (Helicoverpa zea), European corn borer (ECB) (Ostrinia nubialis), fall armyworm (FAW) (Spodoptera frugiperda JE Smith), Soybean looper (SBL) (Pseudoplusia includens), and velvet bean caterpillar (VBC) (Anticarsia gemmatalis Hübner) were conducted using a dilution series of purified N-6×His-IPD103Aa (SEQ ID NO: 2) or N-6×His IPD103Ab (SEQ ID NO: 4) polypeptides incorporated into an agar-based Lepidoptera diet (Southland Products Inc., Lake Village, Ark.) in a 96-well plate format. Four replicates were used per sample. Two to five neonate insects were placed into each well of the treated plate. After four days of incubation at 27° C. larvae were scored for mortality or severity of stunting. The scores were recorded numerically as dead (3), severely stunted (2) (little or no growth but alive and equivalent to a 1^{st} instar larvae), stunted (1) (growth to second instar but not equivalent to controls), or normal (0). Results from bioassays of a dilution series of N-6×His-tagged IPD103Aa (SEQ ID NO: 2) and N-6×His IPD103Ab (SEQ ID NO: 4) against the Lepidoptera pests are shown in Table 3. Values represent the mean larval inhibition score of 4 replicate assays.

TABLE 3

| | Dose (ppm) | CEW | ECB | FAW | SBL | VBC |
|---|---|---|---|---|---|---|
| NT-6xHis | 1350 | 3 | 2 | 2 | 3 | 3 |
| IPD103Aa | 675 | 2.25 | 2 | 2 | 2 | 2 |
| (SEQ ID NO: 2) | 338 | 2 | 2 | 2 | 1.5 | 2 |
| | 169 | 2 | 2 | 2 | 2 | 2 |
| | 84 | 2 | 2 | 0.75 | 2 | 2 |
| | 42 | 2 | 1.5 | 0 | 1 | 1 |
| | 21 | 1.5 | 1.5 | 0 | 0 | 0 |
| | 11 | 0.25 | 1 | 0 | 0 | 0 |
| Buffer Control | 0 | 0 | 0 | 0 | 0 | 0 |
| NT-6xHis | 925 | 2.5 | 2 | 2 | 2 | 3 |
| IPD103Ab | 463 | 2 | 2 | 2 | 2 | 2.25 |
| (SEQ ID NO: 4) | 231 | 2 | 2 | 1.25 | 2 | 2 |
| | 116 | 2 | 2 | 1.25 | 2 | 2 |
| | 58 | 2 | 2 | 1 | 2 | 2 |
| | 29 | 1.25 | 2 | 0 | 1 | 0.5 |
| | 14 | 0.75 | 2 | 0 | 0 | 0 |
| | 7 | 0.25 | 2 | 0 | 0 | 0 |
| Buffer Control | 0 | 0 | 0 | 0 | 0 | 0 |

### Example 6—Purification and Bioassay of IPD103 Homologs Expressed in E. coli

[0386] The genes encoding IPD103 homologs were subcloned into the pET14b vector (Novagen) using the NdeI/XhoI restriction sites in frame with an N-terminal 6×His tag followed by a thrombin cleavage site with the IPD103 homolog native stop codon. Chemically competent OverExpress® C41 (DE3) SOLOs cells (Lucigen) were transformed with pET14b plasmid DNA, containing the IPD103Aa homolog gene for recombinant protein expression. The transformed E. coli cells were grown overnight at 37° C. with ampicillin selection and then inoculated to afresh 2×YT medium (1:100) and further grown to an optical density of about 0.8-1.2. Protein expression was induced by adding 1.0 mM IPTG and cells were further grown at 16° C. for 16 hours. The E. coli expressed proteins were purified by immobilized metal ion chromatography (IMAC) using Talon® Cobalt resin (Clonetech, Mountain View, Calif.) according to the manufacturer's protocols. The purified 1.5 mL fractions eluted in 250 mM imidazole were dialyzed into PBS buffer using 6K MWCO Flextubes (IBI, Peosta, Iowa) on astir plate at 4 C overnight. The dialyzed protein was run in the diet assay to evaluate the insecticidal protein effects on larvae of a selection of Lepidoptera. The activity of a series of homologs of IPD13Aa is summarized in Table 4.

TABLE 4

| Homolog | | | | | | |
|---|---|---|---|---|---|---|
| ID | AA Seq | CEW | ECB | FAW | SBL | VBC |
| IPD103Ab | SEQ ID NO: 4 | + | + | + | + | + |
| IPD103AC | SEQ ID NO: 6 | + | + | + | + | + |
| IPD103Ad | SEQ ID NO: 8 | + | + | + | + | + |
| IPD103Ae | SEQ ID NO: 10 | + | + | + | + | + |
| IPD103Ba | SEQ ID NO: 12 | + | + | + | + | + |
| IPD103Bb | SEQ ID NO: 14 | + | + | + | − | + |
| IPD103Bc | SEQ ID NO: 16 | + | + | + | − | + |
| IPD103Bd | SEQ ID NO: 18 | + | + | + | + | + |
| IPD103Be | SEQ ID NO: 20 | + | + | + | + | + |
| IPD103Bf | SEQ ID NO: 22 | + | + | + | + | + |
| IPD103Bg | SEQ ID NO: 24 | + | + | + | + | + |
| IPD103Bh | SEQ ID NO: 26 | + | − | + | − | + |
| IPD103Bi | SEQ ID NO: 28 | + | + | + | + | + |
| IPD103Ca | SEQ ID NO: 34 | + | + | + | + | + |
| IPD103Da | SEQ ID NO: 36 | + | + | + | + | + |

### Example 7—IPD103Aa Variants with Multiple Amino Acid Substitutions

[0387] To create variants of IPD103Aa (SEQ ID NO: 2) with multiple amino acid changes, variant libraries were generated by family shuffling (Chia-Chun J. Chang et al, 1999, Nature Biotechnology 17, 793-797) the polynucleotide sequences of SEQ ID NO: 1, SEQ ID NO: 19, and SEQ ID NO: 37, encoding IPD103Aa (SEQ ID NO: 12), IPD103Be (SEQ ID NO: 20), and IPD103 Da (SEQ ID NO: 38). Three libraries were constructed for generating IPD103 variants. In a first library (Library11), the native polynucleotide sequence of IPD103Aa (SEQ ID NO: 1) and the native polynucleotide sequence of IPD103Be (SEQ ID NO: 19) were used as library parents. In a second library, the native polynucleotide sequence of IPD103Be (SEQ ID NO: 19) and the polynucleotide sequence of SEQ ID NO: 35 encoding the IPD103 Da polypeptide, with codons optimized to increase the similarity to SEQ ID NO:1 were used as library parents. In a third library, native polynucleotide sequences of IPD103Aa (SEQ ID NO: 1) and IPD103Be (SEQ ID NO: 19) and the codon-optimized polynucleotide sequence of IPD103 Da (SEQ ID NO: 35) were used as library parents. The second and third libraries were picked and screened together (Library123).

[0388] After transforming the library variants into E. coli cells, the colonies were picked and cultured in 24-well plates for protein expression. Cell lysates were generated by B-PER® Protein Extraction Reagent (Thermo Scientific, Rockford, Ill.) and screened for CEW and/or FAW insecticidal activity. The active variants were sequenced and the amino acid substitutions were identified. From library 11, 460 variants were screened and 110 active unique variants were sequence identified. From library 123, 552 variants were screened and 78 active unique variants were sequence identified.

[0389] Table 5 summarizes the % identity of the active variants compared to IPD103Aa (SEQ ID NO:2), the number of variants with each % identity, and the variant identification.

TABLE 5

| % Identity to IPD103Aa | # of Unique | |
|---|---|---|
| (SEQ ID NO: 2) | Sequences | Variants |
| 98 | 4 | IPD103lib11reary-19, IPD103lib11reary-41, IPD103-11Reary-14, IPD103-11Reary-25 |
| 97 | 2 | IPD103lib123reary-40, IPD103lib11reary-18 |
| 96 | 10 | IPD103lib123reary-29, IPD103lib123reary-45, IPD103lib11reary-15, IPD103lib11reary-40, |
| | | IPD103lib11reary-55, IPD103lib11reary-66, IPD103lib11reary-73, IPD103lib11reary-79, |
| | | IPD103lib11reary-88, IPD103-11Reary-37 |
| 95 | 8 | IPD103lib11reary-07, IPD103lib11reary-44, IPD103lib11reary-50, IPD103lib11reary-65, |
| | | IPD103lib11reary-69, IPD103-11Reary-16, IPD103-11Reary-29, IPD103-11Reary-34 |
| 94 | 12 | IPD103lib123reary-05, IPD103lib11reary-21, IPD103lib11reary-39, IPD103lib11reary-67, |
| | | IPD103lib11reary-87, IPD103-11Reary-09, IPD103-11Reary-13, IPD103-11Reary-22, IPD103- |
| | | 11Reary-33, IPD103-11Reary-43, IPD103-11Reary-45, IPD103-123Reary-05 |
| 93 | 11 | IPD103lib11reary-08, IPD103lib11reary-12, IPD103lib11reary-13, IPD103lib11reary-34, |
| | | IPD103lib11reary-58, IPD103lib11reary-68, IPD103lib11reary-70, IPD103lib11reary-85, |
| | | IPD103-llReary-17, IPD103-123Reary-12, IPD103-123Reary-33 |
| 92 | 21 | IPD103lib123reary-49, IPD103lib11reary-16, IPD103lib11reary-23, IPD103lib11reary-25, |
| | | IPD103lib11reary-27, IPD103lib11reary-31, IPD103lib11reary-35, IPD103lib11reary-52, |
| | | IPD103lib11reary-56, IPD103lib11reary-59, IPD103-11Reary-01, IPD103-11Reary-05, |
| | | IPD103-11Reary-06, IPD103-11Reary-10, IPD103-11Reary-18, IPD103-11Reary-35, IPD103- |
| | | 11Reary-36, IPD103-11Reary-40, IPD103-11Reary-42, IPD103-123Reary-07, IPD103- |
| | | 123Reary-26 |
| 91 | 17 | IPD103lib123reary-48, IPD103lib11reary-17, IPD103lib11reary-29, IPD103lib11reary-32, |
| | | IPD103lib11reary-42, IPD103lib11reary-45, IPD103lib11reary-51, IPD103lib11reary-53, |
| | | IPD103lib11reary-63, IPD103lib11reary-64, IPD103lib11reary-80, IPD103lib11reary-82, |
| | | IPD103-11Reary-11, IPD103-11Reary-21, IPD103-11Reary-24, IPD103-11Reary-44, IPD103- |
| | | 123Reary-31 |
| 90 | 16 | IPD103lib123reary-27, IPD103lib123reary-68, IPD103lib123reary-72, IPD103lib11reary-10, |
| | | IPD103lib11reary-14, IPD103lib11reary-20, IPD103lib11reary-28, IPD103lib11reary-49, |
| | | IPD103lib11reary-62, IPD103-11Reary-04, IPD103-11Reary-15, IPD103-11Reary-20, IPD103- |
| | | 11Reary-32, IPD103-123Reary-11, IPD103-123Reary-16, IPD103-123Reary-30 |
| 89 | 20 | IPD103lib11reary-03, IPD103lib11reary-09, IPD103lib11reary-ll, IPD103lib11reary-30, |
| | | IPD103lib11reary-33, IPD103lib11reary-46, IPD103lib11reary-48, IPD103lib11reary-54, |
| | | IPD103lib11reary-74, IPD103lib11reary-75, IPD103lib11reary-86, IPD103-11Reary-08, |
| | | IPD103-11Reary-19, IPD103-11Reary-31, IPD103-11Reary-46, IPD103-123Reary-01, IPD103- |
| | | 123Reary-02, IPD103-123Reary-10, IPD103-123Reary-14, IPD103-123Reary-38 |
| 88 | 11 | IPD103lib123reary-18, IPD103lib123reary-65, IPD103lib11reary-38, IPD103lib11reary-47, |
| | | IPD103lib11reary-76, IPD103lib11reary-78, IPD103-11Reary-26, IPD103-11Reary-39, |
| | | IPD103-123Reary-06, IPD103-123Reary-18, IPD103-123Reary-37 |
| 87 | 7 | IPD103lib123reary-15, IPD103lib123reary-59, IPD103lib11reary-01, IPD103lib11reary-22, |
| | | IPD103-11Reary-38, IPD103-123Reary-13, IPD103-123Reary-35 |
| 86 | 4 | IPD103lib123reary-28, IPD103lib123reary-31, IPD103lib11reary-43, IPD103-11Reary-41 |
| 85 | 5 | IPD103lib123reary-55, IPD103lib123reary-07, IPD103lib11reary-83, IPD103-123Reary-22, |
| | | IPD103-123Reary-34 |
| 84 | 3 | IPD103lib123reary-23, IPD103-123Reary-15, IPD103-123Reary-32 |
| 83 | 1 | IPD103lib123reary-30 |
| 82 | 4 | IPD103lib123reary-11, IPD103lib123reary-37, IPD103-123Reary-09, IPD103-123Reary-25 |
| 81 | 5 | IPD103lib123reary-16, IPD103lib123reary-54, IPD103lib123reary-62, IPD103-123Reary-17, |
| | | IPD103-123Reary-19 |
| 80 | 1 | IPD103lib123reary-19 |
| 79 | 2 | IPD103lib123reary-38, IPD103-123Reary-28 |
| 78 | 3 | IPD103lib123reary-47, IPD103lib123reary-01, IPD103-123Reary-21 |
| 77 | 1 | IPD103-123Reary-23 |
| 76 | 8 | IPD103lib123reary-17, IPD103lib123reary-32, IPD103lib123reary-41, IPD103lib123reary-42, |
| | | IPD103lib123reary-46, IPD103lib123reary-58, IPD103lib123reary-67, IPD103-123Reary-08 |
| 75 | 5 | IPD103lib123reary-14, IPD103lib123reary-39, IPD103lib123reary-69, IPD103-123Reary-24, |
| | | IPD103-123Reary-40 |
| 74 | 3 | IPD103lib123reary-34, IPD103lib123reary-63, IPD103lib123reary-77 |
| 73 | 4 | IPD103lib123reary-52, IPD103lib123reary-60, IPD103lib123reary-70, IPD103lib123reary-73 |

### Example 8—Vector Constructs for Expression of IPD103 Polypeptides in Plants

[0390] For testing in maize, expression vectors PHP79658, PHP70659, and PHP7600 were constructed to include a transgene cassette containing one of three different gene designs encoding IPD103Aa (SEQ ID NO: 2), the MMVENH:MMV ENH:BYDV promoter WO 2017/095698), linked to the PINII terminator (US-2014-0130205).

### Example 9—Expression and Insect Bioassay on Transient Leaf Tissues

[0391] To confirm activity of IPD103Aa (SEQ ID NO: 2) and IPD103Ab (SEQ ID NO: 4) the corresponding genes were cloned into a transient expression system under control of the viral promoter dMMV or AtUBQ10 promoter (Dey, et. al., (1999) Plant Mol. Biol. 40:771-782; PCT Patent Publication WO2011133387; Norris S R et al (1993) Plant Mol Biol. 21(5):895-906)). The constructs were infiltrated into leaves. The agro-infiltration method of introducing an Agrobacterium cell suspension to plant cells of intact tissues so that reproducible infection and subsequent plant derived transgene expression may be measured or studied (Kapila, et. al., (1997) Plant Science 122:101-108). Briefly, the unifoliate stage of bush bean (common bean, Phaseolus vulgaris) or soybean (Glycine max), were agro-infiltrated with normalized bacterial cell cultures of test and control strains. Leaf discs were excised from each plantlet and infested with neonates of Soy Bean Looper (SBL) (Pseudoplusia includens), Corn Earworm, (CEW) (Helicoverpa zea), [FAW], Velvet Bean Caterpillar (VBC) (Anticarsia gemmatalis) or European Corn Borer (ECB) (Ostrinia nubialis). Leaf discs from a control were generated with Agrobacterium containing only empty expression vector. Leaf discs from a non-infiltrated plant were used as a second control. The consumption of green leaf tissue was scored after two (CEW, VBC), three (SBL) or four (ECB) days after infestation and given scores of 0 to 9 as indicated by Table 6. The transiently expressed IPD103Aa (SEQ ID NO: 2) and homologs protected bush bean leaf discs from consumption by the infested insects while total green tissue consumption was observed for the negative control and untreated tissue. Transient protein expression of IPD103Aa (SEQ ID NO: 2) and IPD103Ab (SEQ ID NO: 4) were confirmed by a mass spectrometry-based protein identification method using extracted protein lysates from infiltrated leave tissues (Patterson, (1998) 10(22):1-24, Current Protocol in Molecular Biology published by John Wiley & Son Inc). As shown in Table 10, IPD103Aa (SEQ ID NO: 2) and all the homologs tested resulted in protection of bush bean against leaf feeding damage from a diversity of Lepidoptera. Larval feeding damage to soybean leaves transiently expressing insecticidal genes under the control of the viral promoter dMMV (Dey, et. al., (1999) Plant Mol. Biol. 40:771-782) was assessed using a scale described in Table 6. The effect of expression of IPD103 proteins was compared to non-agro-infiltrated controls and controls expressing DsRed2 fluorescence marker (Clontech, Mountain View, Calif.). Activity of selected IPD103 polypeptides, transiently expressed in bush bean, against leaf feeding damage from a selection of Lepidoptera is shown in Table 7. The average score and standard error (SE) for 6 replicate measurements are shown.

[0392] Activity of selected IPD103Aa polypeptides, transiently expressed in Soybean, against leaf feeding damage from a selection of Lepidoptera is shown in Table 8 The average leaf feeding score and standard deviation (StdDev) for 12 replicates/treatment is shown.

TABLE 6

| Leaf Feeding Score | % Consumed |
|---|---|
| 1 | 86-100 |
| 2 | 71-85 |
| 3 | 61-70 |
| 4 | 51-60 |
| 5 | 36-50 |
| 6 | 11-35 |
| 7 | 11-36 |
| 8 | 1-3 |
| 9 | 0 |

TABLE 7

| | | Avg. Leaf | | | Avg. Leaf | | | Avg. Leaf | |
|---|---|---|---|---|---|---|---|---|---|
| | Target | Damage | | Target | Damage | | Target | Damage | |
| Gene | Insect | Score | SE | Insect | Score | SE | Insect | Score | SE |
| IPD103Aa SEQ ID NO: 2 | CEW | 7.7 | 0.3 | ECB | 5.2 | 1.1 | FAW | 4.7 | 0.4 |
| IPD103Ac SEQ ID NO: 6 | | 7.5 | 0.3 | | 6.7 | 0.7 | | 4.8 | 0.7 |
| IPD103Ad SEQ ID NO: 8 | | 8.2 | 0.3 | | 3.2 | 1.2 | | 4.5 | 0.3 |
| IPD103Ae SEQ ID NO: 10 | | 7.3 | 0.3 | | 2.0 | 0.7 | | 3.8 | 0.7 |
| IPD103Ba SEQ ID NO: 12 | | 6.0 | 0.4 | | 1.8 | 0.5 | | 3.2 | 0.2 |
| IPD103Bb SEQ ID NO: 14 | | 6.3 | 0.4 | | 5.8 | 0.2 | | 3.7 | 0.2 |
| IPD103Bc SEQ ID NO: 16 | | 7.0 | 0.6 | | 3.2 | 1.4 | | 3.7 | 0.2 |
| IPD103Bd SEQ ID NO: 18 | | 7.7 | 0.3 | | 7.5 | 0.3 | | 5.7 | 0.3 |
| IPD103Be SEQ ID NO: 20 | | 7.7 | 0.3 | | 5.8 | 0.8 | | 5.5 | 0.4 |
| IPD103Bf SEQ ID NO: 22 | | 7.3 | 0.6 | | 6.2 | 0.7 | | 4.3 | 0.6 |
| IPD103Bg SEQ ID NO: 24 | | 8.0 | 0.4 | | 4.2 | 1.2 | | 4.2 | 0.6 |
| IPD103Bh SEQ ID NO: 26 | | 8.0 | 0.4 | | 6.5 | 1.2 | | 6.0 | 0.8 |
| IPD103Ca SEQ ID NO: 34 | | 6.0 | 0.8 | | 3.8 | 1.5 | | 3.0 | 0.4 |
| IPD103Da SEQ ID NO: 36 | | 6.3 | 0.3 | | 3.3 | 1.1 | | 3.5 | 0.3 |
| Negative Control | | 3.7 | 1.1 | | 2.3 | 1.3 | | 2.2 | 0.2 |
| Untreated | | 3.5 | 0.4 | | 1.2 | 0.2 | | 2.8 | 0.3 |
| IPD103Aa SEQ ID NO: 2 | SBL | 6.0 | 0.4 | VBC | 8.0 | 0.0 | | | |
| IPD103Ac SEQ ID NO: 6 | | 5.2 | 0.2 | | 8.0 | 0.0 | | | |
| IPD103Ad SEQ ID NO: 8 | | 6.0 | 0.3 | | 8.2 | 0.2 | | | |
| IPD103Ae SEQ ID NO: 10 | | 6.0 | 0.4 | | 8.2 | 0.2 | | | |
| IPD103Ba SEQ ID NO: 12 | | 4.3 | 0.3 | | 5.7 | 0.7 | | | |
| IPD103Bb SEQ ID NO: 14 | | 3.8 | 0.3 | | 6.7 | 0.4 | | | |
| IPD103Bc SEQ ID NO: 16 | | 5.3 | 0.9 | | 6.5 | 0.2 | | | |
| IPD103Bd SEQ ID NO: 18 | | 6.0 | 0.4 | | 8.0 | 0.0 | | | |
| IPD103Be SEQ ID NO: 20 | | 5.3 | 0.2 | | 7.8 | 0.2 | | | |
| IPD103Bf SEQ ID NO: 22 | | 4.5 | 0.3 | | 7.7 | 0.2 | | | |
| IPD103Bg SEQ ID NO: 24 | | 5.7 | 0.6 | | 7.8 | 0.2 | | | |
| IPD103Bh SEQ ID NO: 26 | | 5.3 | 0.4 | | 8.5 | 0.2 | | | |
| IPD103Ca SEQ ID NO: 34 | | 3.8 | 0.4 | | 4.8 | 1.3 | | | |
| IPD103Da SEQ ID NO: 36 | | 4.5 | 0.5 | | 7.2 | 0.5 | | | |
| Negative Control | | 3.3 | 0.3 | | 1.0 | 0.0 | | | |
| Untreated | | 4.0 | 0.7 | | 2.7 | 1.1 | | | |

TABLE 8

| | | CEW | | SBL | | VBC | |
|---|---|---|---|---|---|---|---|
| | | Avg. | Std. | Avg. | | Avg. | |
| | SEQ ID NO | Score | DEV | Score | | Score | |
| IPD103Aa | SEQ ID NO: 2 | 7.8 | 0.5 | 7.8 | 0.8 | 7.2 | 0.7 |
| IPD103Bc | SEQ ID NO: 16 | 7.8 | 0.7 | 6.3 | 0.7 | 6.0 | 1.3 |
| IPD103Bd | SEQ ID NO: 18 | 8.2 | 0.4 | 7.8 | 0.6 | 6.8 | 1.8 |
| IPD103Be | SEQ ID NO: 20 | 6.8 | 0.6 | 6.7 | 0.8 | 6.4 | 1.2 |
| IPD103Bh | SEQ ID NO: 26 | 8.0 | 0.4 | 7.8 | 0.6 | 6.7 | 2.1 |
| IPD103Da | SEQ ID NO: 36 | 2.0 | 1.6 | 4.4 | 1.6 | 1.3 | 0.7 |
| DsRed control | | 1.0 | 0.0 | 1.3 | 0.5 | 1.0 | 0.0 |
| Neg. control | | 1.0 | 0.0 | 1.7 | 1.5 | 1.2 | 0.4 |

### Example 10—Agrobacterium-Mediated Transformation of Maize and Regeneration of Transgenic Plants

[0393] For Agrobacterium-mediated transformation of maize with nucleotide sequences of the embodiment the method of Zhao was used (U.S. Pat. No. 5,981,840 and PCT Patent Publication Number WO 1998/32326; the contents of which are hereby incorporated by reference). Briefly, immature embryos were isolated from maize and the embryos contacted with a suspension of Agrobacterium under conditions whereby the bacteria are capable of transferring the PHP79658, PHP70659, and PHP7600 vectors to at least one cell of at least one of the immature embryos (step 1: the infection step). In this step the immature embryos were immersed in an Agrobacterium suspension for the initiation of inoculation. The embryos were co-cultured for a time with the Agrobacterium (step 2: the co-cultivation step). The immature embryos were cultured on solid medium following the infection step. Following this co-cultivation period an optional “resting” step is contemplated. In this resting step, the embryos were incubated in the presence of at least one antibiotic to inhibit the growth of Agrobacterium without the addition of a selective agent for plant transformation (step 3: resting step). The immature embryos were cultured on solid medium with antibiotic, but without a selecting agent, for elimination of Agrobacterium and for a resting phase for the infected cells. Next, inoculated embryos were cultured on medium containing a selective agent and growing transformed callus is recovered (step 4: the selection step). The immature embryos were cultured on solid medium with a selective agent resulting in the selective growth of transformed cells. The callus was then regenerated into plants (step 5: the regeneration step), and calli grown on selective medium or cultured on solid medium to regenerate the plants.

[0394] For detection of the IPD103 proteins in leaf tissue 4 lyophilized leaf punches/sample were pulverized and resuspended in 100 μL PBS containing 0.1% Tween 20 (PBST), 1% beta-mercaoptoethanol containing 1 tablet/7 mL complete Mini proteinase inhibitor (Roche 1183615301). The suspension was sonicated for 2 min and then centrifuged at 4° C., 20,000 g for 15 min. To a supernatant aliquot ⅓ volume of 3× NuPAGE® LDS Sample Buffer (Invitrogen™ (CA, USA), 1% B-ME containing 1 tablet/7 mL complete Mini proteinase inhibitor was added. The reaction was heated at 80° C. for 10 min and then centrifuged. A supernatant sample was loaded on 4-12% Bis-Tris Midi gels with MES running buffer as per manufacturer's (Invitrogen™) instructions and transferred onto a nitrocellulose membrane using an iBlot® apparatus (Invitrogen™). The nitrocellulose membrane was incubated in PBST containing 5% skim milk powder for 2 hours before overnight incubation in affinity-purified rabbit anti-IPD103Aa polyclonal antibody in PBST overnight. The membrane was rinsed three times with PBST and then incubated in PBST for 15 min and then two times 5 min before incubating for 2 hours in PBST with goat anti-rabbit-HRP for 3 hours. The detected proteins were visualized using ECL Western Blotting Reagents (GE Healthcare cat # RPN2106) and visualized using a luminescent image analyzer (ImageQuant LAS 4000, GE Healthcare Transgenic maize plants positive for expression of the insecticidal proteins are tested for pesticidal activity using standard bioassays. Such methods include, for example, whole plant bioassays.

### Example 11—Particle Bombardment Transformation and Regeneration of Transgenic Maize Plants

[0395] Immature maize embryos from greenhouse donor plants are bombarded with a plasmid containing a nucleotide sequence encoding the insecticidal protein. The ears are husked and surface sterilized in 30% Clorox® bleach plus 0.5% Micro detergent for 20 minutes and rinsed two times with sterile water. The immature embryos are excised and placed embryo axis side down (scutellum side up), 25 embryos per plate, on 560Y medium for 4 hours and then aligned within the 2.5 cm target zone in preparation for bombardment. A plasmid vector DNA comprising the nucleotide sequence encoding the insecticidal protein operably linked to a promoter is precipitated onto 1.1 μm (average diameter) tungsten pellets using a CaCl₂ precipitation procedure as follows: 100 μl prepared tungsten particles in water; 10 μl (1 μg) DNA in Tris EDTA buffer (1 μg total DNA); 100 μl 2.5 M CaCl₂ and 10 μl 0.1 M spermidine.

[0396] Each reagent is added sequentially to the tungsten particle suspension, while maintained on the multitube vortexer. The final mixture is sonicated briefly and allowed to incubate under constant vortexing for 10 minutes. After the precipitation period, the tubes are centrifuged briefly, liquid removed, washed with 500 ml 100% ethanol and centrifuged for 30 seconds. Again, the liquid is removed, and 105 μl 100% ethanol is added to the final tungsten particle pellet. For particle gun bombardment, the tungsten/DNA particles are briefly sonicated and 10 μl spotted onto the center of each macrocarrier and allowed to dry about 2 minutes before bombardment. The sample plates are bombarded at level #4 in a particle gun. All samples receive a single shot at 650 PSI, with a total of ten aliquots taken from each tube of prepared particles/DNA

[0397] Following bombardment, the embryos are kept on 560Y medium for 2 days, then transferred to 560R selection medium containing 3 mg/liter Bialaphos, and subcultured every 2 weeks. After approximately 10 weeks of selection, selection-resistant callus clones are transferred to 288J medium to initiate plant regeneration. Following somatic embryo maturation (2-4 weeks), well-developed somatic embryos are transferred to medium for germination and transferred to the lighted culture room. Approximately 7-10 days later, developing plantlets are transferred to 272V hormone-free medium in tubes for 7-10 days until plantlets are well established. Plants are then transferred to inserts in flats (equivalent to 2.5″ pot) containing potting soil and grown for 1 week in a growth chamber, subsequently grown an additional 1-2 weeks in the greenhouse, then transferred to classic 600 pots (1.6 gallon) and grown to maturity. Plants are monitored and scored for expression of an IPD103 polypeptide by assays, for example, immunoassays and Western blotting.

[0398] Transgenic maize plants positive for expression of the insecticidal proteins are tested for pesticidal activity using standard bioassays. Such methods include, for example, root excision bioassays and whole plant bioassays. See, e.g., US Patent Application Publication Number US 2003/0120054 and International Publication Number WO 2003/018810.

[0399] Bombardment medium (560Y) comprises 4.0 g/l N6 basal salts (SIGMA C-1416), 1.0 ml/l Eriksson's Vitamin Mix (1000 times SIGMA-151 1), 0.5 mg/l thiamine HCl, 120.0 g/sucrose, 1.0 mg/2,4-D and 2.88 g/l L-proline (brought to volume with D-I H₂O following adjustment to pH 5.8 with KOH); 2.0 g/l Gelrite (added after bringing to volume with D-I H₂O) and 8.5 mg/l silver nitrate (added after sterilizing the medium and cooling to room temperature). Selection medium (560R) comprises 4.0 g/l N6 basal salts (SIGMA C-1416), 1.0 ml/l Eriksson's Vitamin Mix (1000 times SIGMA-151 1), 0.5 mg/l thiamine HCl, 30.0 g/l sucrose and 2.0 mg/l 2,4-D (brought to volume with D-I H₂O following adjustment to pH 5.8 with KOH); 3.0 g/l Gelrite (added after bringing to volume with D-I H₂O) and 0.85 mg/l silver nitrate and 3.0 mg/l bialaphos (both added after sterilizing the medium and cooling to room temperature).

[0400] Plant regeneration medium (288J) comprises 4.3 g/l MS salts (GIBCO 1 1 1 17-074), 5.0 ml/l MS vitamins stock solution (0.100 g nicotinic acid, 0.02 g/l thiamine HCL, 0.10 g/l pyridoxine HCL, and 0.40 g/l glycine brought to volume with polished D-I H₂O) (Murashige and Skoog, (1962) Physiol. Plant. 15:473), 100 mg/l myo-inositol, 0.5 mg/l zeatin, 60 g/l sucrose and 1.0 ml/l of 0.1 mM abscisic acid (brought to volume with polished D-I H₂O after adjusting to pH 5.6); 3.0 g/l Gelrite (added after bringing to volume with D-I H₂O) and 1.0 mg/l indoleacetic acid and 3.0 mg/l bialaphos (added after sterilizing the medium and cooling to 60° C.). Hormone-free medium (272V) comprises 4.3 g/i MS salts (GIBCO 1 1 1 17-074), 5.0 ml/l MS vitamins stock solution (0.100 g/l nicotinic acid, 0.02 g/l thiamine HCL, 0.10 g/l pyridoxine HCL and 0.40 g/l glycine brought to volume with polished D-I H₂O), 0.1 g/l myoinositol and 40.0 g/l sucrose (brought to volume with polished D-I H₂O after adjusting pH to 5.6) and 6 g/l bacto-agar (added after bringing to volume with polished D-I H₂O), sterilized and cooled to 60° C.

### Example 12—Insect Control Efficacy of Stable Transformed Corn Plants Against a Spectrum of Lepidopteran Insects

[0401] Leaf discs were excised from transformed maize plants and tested for insecticidal activity of IPD103Aa polypeptides against the European Co Borer (ECB) (Ostrinia nubilalis), Corn Earworm, (CEW) (Helicoverpa zea), and Fall Armyworm (Spodoptera frugiperda). The constructs, PHP79658, PHP79559 and PHP79660 for the expression of three IPD103Aa gene designs were used to generate transgenic maize events to test for efficacy against feeding damage caused by lepidopteran pests provided by expression of these poypeptides. FIG. 2 demonstrates that strong protection from leaf feeding by a broad spectrum of Lepidoptera pests was conferred by expression of IPD103Aa genes.

### Example 13—Greenhouse Efficacy of IPD103 Polypeptide Events

[0402] TO greenhouse efficacy results for events generated from PHP79658, PHP79659 and PHP79660 constructs are shown in FIG. 4. Efficacy for events derived from all 3 constructs was observed relative to negative control events (Empty) as measured by corn ear protection from corn earworm (CEW). Ear protection was measured, using a grid, as the number of square centimeters (CEWSCM) of ear feeding damage. FIG. 4 shows that a large proportion of events from PHP79658, PHP79659 and PHP79660 performed better than the negative control and have earworm injury scores of 2 cm² or less

### Example 14—Transformation and Regeneration of Soybean (Glycine Max)

[0403] Transgenic soybean lines are generated by the method of particle gun bombardment (Klein et al., Nature (London) 327:70-73 (1987); U.S. Pat. No. 4,945,050) using a BIORAD Biolistic PDS1000/He instrument and either plasmid or fragment DNA. The following stock solutions and media are used for transformation and regeneration of soybean plants:

### Stock Solutions:

[0404] Sulfate 100× Stock:
[0405] 37.0 g MgSO₄.7H₂O, 1.69 g MnSO₄.H₂O, 0.86 g ZnSO₄.7H₂O, 0.0025 g CuSO₄.5H₂O

[0406] Halides 100× Stock:
[0407] 30.0 g CaCl₂.2H₂O, 0.083 g KI, 0.0025 g CoCl₂.6H₂O

[0408] P, B, Mo 100× Stock:
[0409] 18.5 g KH₂PO₄, 0.62 g H₃BO₃, 0.025 g Na₂MoO₄.2H₂O

[0410] Fe EDTA 100× Stock:
[0411] 3.724 g Na₂EDTA, 2.784 g FeSO₄.7H₂O

[0412] 2,4-D Stock:
[0413] 10 mg/mL Vitamin

[0414] B5 vitamins, 1000× Stock:
[0415] 100.0 g myo-inositol, 1.0 g nicotinic acid, 1.0 g pyridoxine HCl, 10 g thiamine.HCL.

### Media (Per Liter):

[0416] SB199 Solid Medium:
[0417] 1 package MS salts (Gibco/BRL—Cat No. 11117-066), 1 mL B5 vitamins 1000× stock, 30 g Sucrose, 4 ml 2, 4-D (40 mg/L final concentration), pH 7.0, 2 g Gelrite

[0418] SB1 Solid Medium:
[0419] 1 package MS salts (Gibco/BRL—Cat No. 11117-066), 1 mL B5 vitamins 1000× stock, 31.5 g Glucose, 2 mL 2, 4-D (20 mg/L final concentration), pH 5.7, 8 g TC agar

[0420] SB196:
[0421] 10 mL of each of the above stock solutions I-4, 1 mL B5 Vitamin stock, 0.463 g (NH4)2 SO4, 2.83 g KNO3, 1 mL 2,4 D stock, 1 g asparagine, 10 g Sucrose, pH 5.7

[0422] SB71-4:
[0423] Gamborg's B5 salts, 20 g sucrose, 5 g TC agar, pH 5.7.

[0424] SB103:
[0425] 1 pk. Murashige & Skoog salts mixture, 1 mL B5 Vitamin stock, 750 mg MgCl2 hexahydrate, 60 g maltose, 2 g gelrite, pH 5.7.

[0426] SB166:
[0427] SB103 supplemented with 5 g per liter activated charcoal.

### Soybean Embryogenic Suspension Culture Initiation:

[0428] Pods with immature seeds from available soybean plants 45-55 days after planting are picked, removed from their shells and placed into a sterilized magenta box. The soybean seeds are sterilized by shaking them for 15 min in a 5% Clorox solution with 1 drop of ivory soap (i.e., 95 mL of autoclaved distilled water plus 5 mL Clorox and 1 drop of soap, mixed well). Seeds are rinsed using 2, 1-liter bottles of sterile distilled water and those less than 3 mm are placed on individual microscope slides. The small end of the seed is cut and the cotyledons pressed out of the seed coat. Cotyledons are transferred to plates containing SB199 medium (25-30 cotyledons per plate) for 2 weeks, then transferred to SB1 for 2-4 weeks. Plates are wrapped with fiber tape. After this time, secondary embryos are cut and placed into SB196 liquid medium for 7 days.

### Culture Conditions:

[0429] Soybean embryogenic suspension cultures (cv. 93Y21) were maintained in 50 mL liquid medium SB196 on a rotary shaker, 100-150 rpm, 26° C. on 16:8 h day/night photoperiod at light intensity of 80-100 μE/m2/s. Cultures are subcultured every 7-14 days by inoculating up to ½ dime size quantity of tissue (clumps bulked together) into 50 mL of fresh liquid SB196.

### Preparation of DNA for Bombardment

[0430] In particle gun bombardment procedures, it is possible to use purified 1) entire plasmid DNA; or 2) DNA fragments containing only the recombinant DNA expression cassette(s) of interest. For every seventeen bombardment transformations, 85 μL of suspension is prepared containing 1 to 90 picograms (pg) of plasmid DNA per base pair of each DNA plasmid. DNA plasmids or fragments are co-precipitated onto gold particles as follows. The DNAs in suspension are added to 50 μL of a 10-60 mg/mL 0.6 μm gold particle suspension and then combined with 50 μL CaCl₂ (2.5 M) and 20 μL spermidine (0.1 M). The mixture is vortexed for 5 secs, spun in a microfuge for 5 secs, and the supernatant removed. The DNA-coated particles are then washed once with 150 μL of 100% ethanol, vortexed and spun in a microfuge again, then resuspended in 85 μL of anhydrous ethanol. Five μL of the DNA-coated gold particles are then loaded on each macrocarrier disk.

Tissue Preparation and Bombardment with DNA:

[0431] Approximately 100 mg of two-week-old suspension culture is placed in an empty 60 mm×15 mm petri plate and the residual liquid removed from the tissue using a pipette. The tissue is placed about 3.5 inches away from the retaining screen and each plate of tissue is bombarded once. Membrane rupture pressure is set at 650 psi and the chamber is evacuated to −28 inches of Hg. Following bombardment, the tissue from each plate is divided between two flasks, placed back into liquid media, and cultured as described above.

### Selection of Transformed Embryos and Plant Regeneration:

[0432] After bombardment, tissue from each bombarded plate is divided and placed into two flasks of SB196 liquid culture maintenance medium per plate of bombarded tissue. Seven days post bombardment, the liquid medium in each flask is replaced with fresh SB196 culture maintenance medium supplemented with 100 ng/mL selective agent (selection medium). For selection of transformed soybean cells the selective agent used can be a sulfonylurea (SU) compound with the chemical name, 2-chloro-N-((4-methoxy-6 methy-1,3,5-triazine-2-yl)aminocarbonyl) benzenesulfonamide (common names: DPX-W4189 and Chlorsulfuron). Chlorsulfuron is the active ingredient in the DuPont sulfonylurea herbicide, GLEAN®. The selection medium containing SU is replaced every two weeks for 8 weeks. After the 8 week selection period, islands of green, transformed tissue are observed growing from untransformed, necrotic embryogenic clusters. These putative transgenic events are isolated and kept in SB196 liquid medium with SU at 100 ng/mL for another 5 weeks with media changes every 1-2 weeks to generate new, clonally propagated, transformed embryogenic suspension cultures. Embryos spend a total of around 13 weeks in contact with SU. Suspension cultures are subcultured and maintained as clusters of immature embryos and also regenerated into whole plants by maturation and germination of individual somatic embryos.

[0433] Somatic embryos became suitable for germination after four weeks on maturation medium (1 week on SB166 followed by 3 weeks on SB103). They are then removed from the maturation medium and dried in empty petri dishes for up to seven days. The dried embryos are then planted in SB71-4 medium where they are allowed to germinate under the same light and temperature conditions as described above. Germinated embryos are transferred to potting medium and grown to maturity for seed production.

### Example 15—Testing Cross-Resistance of Cry1Ab and Cry1F-Selected European Corn Borer

[0434] To determine if Cry1Ab or Cry1F-resistant insects were cross-resistant to N-6×His-IPD103Aa (SEQ ID NO: 2), European corn borer (ECB, Ostrinia nubilalis) larvae susceptible or resistant to Cry1Ab (Crespo A. et al., Pest Manag Sci 65: 1071-1081, 2009) or Cry1F (Siegfried B. et al., Pest Manag Sci 70: 725-733, 2014), were treated with N-6×His-IPD103Aa (SEQ ID NO: 2). The laboratory Cry1F-selected strain (Cry1F-R) originated from a combination of five field populations collected in 2007 and was selected for resistance using increasing amounts of lyophilized leaf tissue of Cry1F-expressing maize (Alves, A, US 2012/0148497 A1, 2012).

[0435] Larval susceptibility of ECB strains resistant to Cry1Ab (Cry1Ab-res) or Cry1F (Cry1F-res) and susceptible strains (SS) to the insecticidal proteins was determined using a diet incorporated bioassay method. Briefly, 25 μL of a sample was mixed with 75 μL of artificial diet per well in a 96-well plate. Each bioassay included eight concentrations of the sample as well as the negative buffer control, four replications for each concentration, and eight individuals for each replicate. One ECB neonate larva (<24 h after hatch) was placed in each assay well. Once infested, the plates were sealed with Mylar and ventilation holes were added to each well using #1 or #2 insect pins. Plates were incubated at 27° C., 50% RH, and a photoperiod of 16:8 hours (L:D). Mortality and larval growth inhibition (defined as inhibition if larva did not enter second instar within 6 days) by each sample were scored after a 6 day exposure. Concentrations resulting in 50% mortality (LC50) or inhibition of 50% of the individuals (IC50) were calculated based on Probit analysis. The resistance ratio (RR)=(LC50 of resistant ECB)/(LC50 of susceptible ECB) was >300 fold to Cry1Ab for the Cry1A-res colony and >1000 to Cry1F for the Cry1F-res colony. Table 9 shows that the Cry1A- or CryF-resistant ECB were not cross-resistant to N-6×His-IPD103Aa (SEQ ID NO: 2).

TABLE 9

| ECB | | | Lower | Upper | Resistance |
|---|---|---|---|---|---|
| colony | LC/IC | ppm | 95% CL | 95% CL | Ratio |
| SS | LC50 | 128.7 | 97.1 | 187.5 | z |
| | IC50 | 40.8 | 33.2 | 50 | |
| Cry1A- | LC50 | >256 (38% mortality) | | | >2 |
| res | IC50 | 194.5 | 143.3 | 314.9 | 4.8 |
| Cry1F- | LC50 | ~256 | | | ~2 |
| res | IC50 | 168.8 | 117.7 | 293.2 | 4.1 |

### Example 16—Testing Cross-Resistance of Cry1A-Selected Diamondback Moth

[0436] A diet overlay assay similar to the method described by Kain et al. (J. Econ. Entomol. 97: 2073-2078, 2004) was used to determine the susceptibility of diamondback moth (DBM, Plutella xylostella) to N-6×His-IPD103Aa (SEQ ID NO: 2). Eight concentrations of N-6×His-IPD103Aa (SEQ ID NO: 2) plus a control and three cups (replications) for each concentration were included in each bioassay with the resistant (Cry1A-res) or susceptible DBM colony. An aliquot of 0.2 mL of IPD103Aa solution was applied to and evenly distributed over the diet surface (surface area 7 cm²) of 30-mL plastic cups with 5 ml of artificial diet. Ten DBM neonates were transferred into each cup. Cups were covered with lids and held at 27° C., 50% RH, and a photoperiod of 16:8 (L:D) h and mortality or growth inhibition assessed after 5 days. Concentrations for 50% mortality (LC50) or inhibition of 50% of the individuals (IC50) were calculated based on Probit analysis. The RR was ˜100 fold with Cry1A.88 for the Cry1A-res colony. Table 10 shows that the Cry1A resistant DBM were not cross-resistant to N-6×His-IPD103Aa (SEQ ID NO: 2).

TABLE 10

| DBM | | | Lower | Upper | Resistance |
|---|---|---|---|---|---|
| strain | LC/IC | μg/cm² | 95% CL | 95% CL | Ratio |
| SS | LC50 | 2.9 | 2.1 | 4.0 | |
| | IC50 | 1.7 | 1.3 | 2.2 | |
| Cry1A- | LC50 | 4.6 | 3.6 | 6.0 | 1.6 |
| res | IC50 | 1.7 | 1.2 | 2.2 | 1 |

### Example 17—Site of Action of IPD103Aa

[0437] IPD103Aa (SEQ ID NO: 2) was evaluated for stability in the presence of midgut fluid extracts from Helicoverpa zea (Corn Earworm) and Ostrinia nubilalis (European Corn Borer) to determine if the full-length state represents pro-forms of the proteins and whether midgut proteolysis is required for activation to a toxic state in vivo.

[0438] The direct binding of the IPD103Aa (SEQ ID NO: 2) to Helicoverpa zea (Corn Earworm) brush border membrane vesicles was tested for target site identification. FIG. 4 shows the average densitometry values for bound Alexa-IPD103Aa (SEQ ID NO: 2) in the presence of different concentrations of unlabeled IPD103Aa (SEQ ID NO: 2) normalized to the amount bound in the absence of unlabeled IPD103Aa (SEQ ID NO: 2). The solid line reflects the best fit of a square logistic equation to the data. The data are best fit by a sigmoidal dose response equation having EC50 values of 38 nM.

[0439] The direct binding of the IPD103Aa (SEQ ID NO: 2) to Ostrinia nubilais (European Corn Borer) brush border membrane vesicles was tested for target site identification. FIG. 5 shows the average densitometry values for bound Alexa-IPD103Aa (SEQ ID NO: 2) in the presence of different concentrations of unlabeled IPD103Aa (SEQ ID NO: 2) normalized to the amount bound in the absence of unlabeled IPD103Aa (SEQ ID NO: 2). The solid line reflects the best fit of a square logistic equation to the data. The data are best fit by a sigmoidal dose response equation having EC50 values of 83 nM.

### Example 18—Saturation Mutagenesis of IPD103Aa Variant

[0440] Saturation mutagenesis was performed at selected codons of the polynucleotide encoding the IPD103 variant IPD103lib11reary-54 (Example 7—Table 5). Mutants were generated by site directed mutagenesis (QuikChange® Lightning Multi Site Directed Mutagenesis Kit, Agilent Technologies). After transforming the resulting library variants into E. coli cells, colonies were sequence identified. Unique clones were picked and cultured in 96-well plates for protein expression. Cell lysates were generated by B-PER® Protein Extraction Reagent from Thermo Scientific (3747 N Meridian Rd, Rockford, Ill. USA 61101) and screened for CEW insecticidal activity. Table 11 summarizes the amino acid substitutions identified at each mutagenized position of IPD103lib11reary-54 and amino acid substitutions that retained insecticidal activity.

TABLE 11

| AA | Position | Identified substitutions | Active substitutions |
|---|---|---|---|
| A | 002 | G, V, L, I, P, S, T, C, N, Q, D, E, K, R | G, V, L, I, P, S, T, C, N, Q, E, K, R |
| D | 003 | G, A, V, L, I, W, F, P, S, T, C, E, R | G, A, V, L, I, W, F, P, S, T, C, E, R |
| P | 004 | G, A, L, W, S, Y, Q, D, E, K, R, H | G, A, L, W, S, Y, Q, D, E, K, R, H |
| A | 005 | G, V, L, P, S, C, Q, D, E, K, R | G, V, L, P, S, C, Q, D, E, K, R |
| T | 006 | G, A, V, L, I, P, S, N, Q, D, E, K, R | G, A, V, L, I, P, S, N, Q, D, E, K, R |
| A | 007 | G, V, L, W, F, P, T, C, D, K, R | G, V, L, W, F, P, T, C, D, K, R |
| A | 008 | G, L, W, P, S, T, Y, N, D, E, K, R | G, L, W, P, S, T, Y, N, D, E, K, R |
| R | 009 | G, A, V, L, I, W, F, P, S, T, N, D, E | G, A, V, L, I, W, F, P, S, T, N, D, E |
| E | 010 | G, A, V, L, M, W, S, K, R | G, A, V, L, M, W, S, K, R |
| A | 011 | G, V, W, P, S, T, C, Y, E, K, R, H | G, V, W, P, S, T, C, Y, E, K, R, H |
| E | 012 | G, V, L, W, P, S, T, Y, K, R, H | G, V, L, W, P, S, T, Y, K, R, H |
| E | 013 | G, V, L, I, M, W, F, S, D, K, R | G, V, L, I, M, W, F, S, D, K, R |
| E | 014 | G, A, V, L, F, S, T, C, Y, N, Q, R | G, A, V, L, F, S, T, C, Y, N, Q, R |
| V | 015 | G, A, L, I, S, Q, D, E, K, R | G, A, L, I, S, Q, D, E, K, R |
| Q | 016 | G, A, V, L, I, W, F, P, S, T, D, R, H | G, A, V, L, I, W, F, P, S, T, D, R, H |
| E | 017 | G, A, V, L, M, S, T, C, D, K, R | G, A, V, L, M, S, T, C, D, K, R |
| T | 018 | G, V, L, I, M, W, P, S, C, Q, D, E, R | G, V, L, I, M, W, P, S, C, Q, D, E, R |
| L | 019 | G, A, W, F, P, S, T, C, Y, N, Q, E, K, R | G, W, F, P, S, T, C, Y, N, Q, E, K, R |
| M | 020 | A, V, L, I, W, F, P, S, T, Q, D, E, K, R, H | S, T |
| D | 021 | G, A, V, L, W, F, S, C, N, Q, K, R, H | G, A, V, C, N, H |
| E | 022 | G, A, V, L, M, W, P, S, Y, D, R, H | G, A, M, P, S, D |
| T | 023 | G, A, V, L, I, M, W, P, S, N, Q, E, K, R, H | V, I, S |
| E | 024 | G, V, L, M, W, P, C, Y, Q, K, R | V, M, W, P, C, Q. |
| A | 025 | G, V, I, M, W, C, Y, E, R | G, V, I, M, C, E, R |
| V | 026 | G, A, L, I, M, W, S, T, Q, D, E, K, R, H | Q |
| G | 027 | A, V, L, I, M, W, P, S, C, D, K, R | |
| T | 028 | G, A, V, L, I, M, W, F, C, Q, E, K, R | A, V, I, M, C, Q, E |
| H | 029 | G, A, V, L, M, W, P, S, T, Y, N, Q, D, E, R | V, S |
| L | 030 | G, A, I, W, P, S, T, C, N, Q, D, E, K, R, H | I, P |
| D | 031 | G, A, V, L, M, F, S, T, E, R, H | S |
| F | 032 | G, A, V, L, I, M, W, P, T, N, Q, E, R, H | G, A, V, L, I, M, W, T, N, Q, E, H |
| V | 033 | G, L, M, W, F, P, S, T, C, Q, D, E, R, H | G, L, M, W, P, S, T, C, Q, E, R, H |
| A | 034 | G ,V, L, I, M, W, F, S, T, C, Y, Q, E, K, R, H | G, V, L, M, S, T, C, Y, Q, E, K, R, H |
| G | 035 | A, V, L, I, M, P, S, T, N, Q, D, K, R, H | A, M, P, S, T, N, D |
| L | 036 | G, A, M, W, P, S, T, C, Q, D, E, R | A, M |
| E | 037 | G, A, V, L, M, S, N, D, K, R | G, A, V, L, M, S, N, D, K, R |
| V | 038 | G, L, M, W, S, T, Q, E, K, R, H | L, K |
| Q | 039 | G, A, L, P, S, C, Y, N, D, E, R | A, L, C, Y, N, D, E, R |
| P | 040 | G, A, V, I, M, F, S, T, C, Q, D, E, K, R | A |
| R | 041 | G, A, V, L, I, M, W, F, P, S, T, C, N, D, E | A, V, L, I, M, F, P, S, T, N, E |
| K | 042 | G, A, V, L, M, F, P, S, T, C, Y, Q, E, R, H | G, A, V, S, T, Q, E, R |
| V | 043 | G, L, I, M, W, P, S, T, E, K, R | M, T |
| I | 044 | G, A, V, L, M, W, P, S, T, Y, E, K, R | V, M |
| T | 045 | G, A, V, L, I, W, P, S, C, Q, E, K, R | A, S, E |
| V | 046 | G, A, L, F, S, C, Y, Q, E, K, R, H | L, Q, H |
| E | 047 | G, V, L, M, W, F, S, N, K, R | |
| V | 048 | A, L, I, M, W, P, S, D, E, R, H | A, L, I, M |
| D | 049 | G, A, V, L, M, W, F, P, S, Q, R, H | |
| A | 050 | G, V, L, M, W, P, S, E, K, R | G, V, L, M, W, P, S |
| A | 051 | G, V, L, M, W, S, T, C, Q, D, E, K, R | G, V, T, C, Q |
| A | 052 | G, V, L, I, M, P, S, T, C, N, Q, D, R | G, V, L, M, P, S, T, N, Q, D |
| V | 053 | G, L, W, F, S, C, Y, Q, E, K, R, H | L |
| I | 054 | G, A, V, L, W, S, T, C, Y, E, R, H | A, V, L, W, Y |
| Q | 055 | G, V, L, I, W, P, S, C, Y, E, K, R, H | G, V, L, I, S, C, Y, E, K, H |
| Q | 056 | G, A, V, L, W, P, S, T, N, E, K, R | G, A, L, S, T, N, E, K, R |
| I | 057 | G, A, V, L, M, W, P, S, T, Y, N, D, R | V, L, T |
| R | 058 | G, A, L, M, W, P, S, T, C, Y, Q, D, K | G, A, L, M, W, P, S, T, C, Y, Q, D, K |
| E | 059 | G, A, L, M, P, S, Y, N, D, K, R | G, A, L, M, S, Y, N, D, K, R |
| I | 060 | G, A, V, L, M, W, S, T, N, Q, E, R, H | V, L, M, W, T, N, Q, E |
| F | 061 | G, A, V, L, M, W, S, Q, E, R | A, L, M, S |
| Q | 062 | G, A, V, L, M, F, P, S, T, R | G, A, V, L, M, F, S, T, R |
| T | 063 | G, A, V, L, P, S, Y, N, D, E, K, R, H | G, A, V, L, S, Y, N, D, E, K, R, H |
| M | 064 | G, A, L, I, W, P, S, T, N, Q, E, K, R | A, L, I |
| A | 065 | G, V, L, M, W, F, S, T, Q, D, E, R, H | G, V, L, M, W, F, S, T, Q, D, E, R, H |
| R | 066 | G, A, V, L, I, P, S, T, C, N, D, K, H | G, A, V, I, P, S, T, C, N, D, K, H |
| H | 067 | G, A, V, L, W, F, S, C, N, K, R | G, W, F, N, K |
| F | 068 | G, A, V, L, W, S, T, N, Q, K, R, H | A, V, L, S, T, Q, H |
| N | 069 | G, A, V, L, M, W, F, S, Y, Q, D, E, K, R | G, A, V, L, F, Y, Q, D |
| S | 070 | G, W, F, T, C, Y, N, Q, K, R | G, F, T, C, Y, N, Q, K, R |
| T | 071 | G, A, V, L, I, M, W, F, P, S, Q, E, K, R | A, L, I, S, Q, E, K, R |
| R | 072 | G, A, V, L, M, F, S, T, Y, Q, D, K, H | G, A, V, L, M, F, S, T, Y, Q, D, K, H |
| V | 073 | G, A, L, I, M, F, P, S, T, N, E, R | A, L, I, S, T |
| V | 074 | G, A, L, I, W, P, S, T, N, E, K, R, H | G, L, I, W, P, S, T, E, K, H |
| R | 075 | G, A, V, I, M, W, F, P, S, T, C, N, D, E, K | P |
| D | 076 | G, A, V, L, I, M, W, P, S, Y, N, E, R | G, A, W, P, S, Y, N |
| E | 077 | G, V, L, M, W, F, P, S, C, Y, N,Q, D, K, R, H | V, M, C, Y, N, Q, K, R, H |
| A | 078 | G, L, I, M, F, S, T, C, N, K, R, H | S, C, N |
| I | 079 | G, A, V, L, P, S, T, C, Y, N, D, E, K, R, H | G, V, P, Y, E |
| K | 080 | G, A, V, L, M, W, P, S, T, C, N, D, E, R | A, V, M, S, T, C, R |
| G | 081 | A, V, L, F, S, C, Y, N, D, E, R | A, V, L, S, C, N, D, R |
| I | 082 | G, A, V, L, M, S, Y, N, D, E, K, R | L, M |
| R | 083 | A, V, I, M, W, F, P, T, C, Q, D, K, H | K |
| D | 084 | G, A, V, L, I, M, P, S, C, E, R, H | |
| H | 085 | A, V, L, I, W, F, S, C, Y, N, Q, D, K, R | |
| F | 086 | G, A, V, L, I, P, S, T, C, Y, N, D, K, R | C |
| R | 087 | G, A, V, L, W, P, S, Q, E, K, H | V, L, Q |
| A | 088 | G, V, L, I, M, P, S, T, C, Y, N, Q, D, E, R, H | V, T, C, Y |
| A | 089 | G, V, L, I, M, F, P, S, C, Y, D, K, R, H | S |
| V | 090 | G, A, L, I, M, P, S, D, R | I, M |
| P | 091 | G, V, L, M, W, F, S, T, C, E, K, R, H | |
| T | 092 | G, A, V, L, I, W, S, Y, Q, E, R, H | V, L, S |
| R | 093 | G, A, V, L, M, F, P, S, T, C, D, E, K | P, S |
| N | 094 | G, A, V, L, M, W, P, T, Y, Q, D, E, R, H | |
| V | 095 | G, A, L, I, W, P, S, T, C, N, Q, D, K, R, H | I, T, C, R |
| V | 096 | G, L, M, W, P, S, T, Y, N, Q, R, H | L |
| V | 097 | G, A, L, W, F, P, T, Y, E, R | A |
| V | 098 | G, A, L, M, W, S, Y, Q, E, K, R | A |
| H | 099 | G, A, V, L, I, M, W, F, T, Y, N, D, E, R | G, A, V, I, T, Y, N, R |
| T | 100 | G, A, V, L, M, W, P, S, C, N, Q, K, R, H | G, A, V, P, S, C, N, Q, H |
| Q | 101 | G, A, V, L, I, S, T, D, E, K, R | L, I, T, D, E, K, R |
| H | 102 | G, A, L, M, P, S, T, N, Q, D, E, R | A, S, N, Q, E, R |
| V | 103 | G, A, L, M, W, F, P, S, T, N, D, E, R | G, A, L, M, W, F, P, S, T, R |
| H | 104 | G, A, L, M, P, S, C, D, K, R | G, A, L, M, S, C, D, K, R |
| T | 105 | G, A, V, L, I, M, F, P, S, C, Y, Q, D, R | A, L, M, S, C, Y, Q |
| L | 106 | I, F, P, S, T, Y, D, R, H | I, F |
| V | 107 | L, I, M, W, P, S, T, Y, D, E, K, R, H | L, I, M, P, S, T, Y, D, E, K, R, H |
| G | 108 | V, L, M, P, S, T, C, Q, D, K | S, Q, D |
| L | 109 | I, M, W, F, P, S, T, Y, N, Q, D, E, K, R | I, M, W, F, P, S, T, Y, N, Q, D, E, K, R |
| E | 110 | G, A, V, L, I, W, F, S, T, Q, K, R | A, V, L, I, S, T, Q, K, R |
| H | 111 | G, A, V, L, W, F, P, S, T, Y, N, Q, D, R | G, A, V, L, W, F, P, S, T, Y, N, Q, D, R |
| T | 112 | G, A, V, L, M, W, P, S, Q, R | G, A, V, L, M, W, P, S, Q, R |
| H | 113 | G, A, V, L, M, W, F, P, S, N,Q, D, R | G, V, L, M, F, S, N, Q, R |
| L | 114 | G, A, V, I, M, W, P, S, N, Q, E, K, R, H | V, I, M, P, Q |
| V | 115 | G, A, L, W, P, S, R, H | G, A, L, W, P, S, R, H |
| L | 116 | G, A, V, M, S, C, Y, Q, R, H | V, M |
| Q | 117 | G, A, V, L, W, P, S, T, E, K, R, H | G, A, V, L, S, T, E, K, R, H |
| T | 118 | G, A, L, W, P, C, Y, Q, E, K, R | A, C |
| G | 119 | A, V, L, I, M, W, F, S, C, Y, N, D, E, R, H | A, V, M, S, N, D, E, H |
| I | 120 | G, A, V, L, M, W, F, S, T, Q, D, E, K, R | G, A, V, L, M, W, F, S, T, Q, E, K, R |
| F | 121 | G, V, L, M, W, P, S, Y, Q, D, E, K, R | G, V, L, M, W, S, Y, Q, E, K |
| K | 122 | G, V, P, S, T, C, Y, N, Q, R | G, P, S, T, C, N, R |
| K | 123 | G, A, V, L, M, W, P, S, T, C, Y, E, R | G, A, W, P, T, Y |
| V | 124 | G, A, W, T, C, N, Q, D, E, R | A, W, T, C, N, Q, R |
| P | 125 | G, A, V, L, W, S, T, Y, Q, E, R | G, A, V, L, W, S, T, Y, Q, E, R |
| V | 126 | G, A, I, F, P, S, T, Y, Q, E | A, I, F, S, T |
| D | 127 | G, A, V, L, M, W, P, S, C, Q, R, H | A, V, L, M, W, S, C, Q, R, H |
| I | 128 | A, V, L, M, W, P, S, Q, D, E, K, R | V, L, M |
| Y | 129 | G, A, V, L, I, M, W, F, P, S, T, D, R, H | |
| V | 130 | G, A, L, M, W, F, S, T, Y, D, E, R | A, L |
| F | 131 | G, V, L, W, S, T, E, R | |
| K | 132 | G, A, V, L, M, P, S, C, Q, E, R, H | G, A, V, L, P, S, C, Q, E, R |
| S | 133 | G, A, L, M, W, P, T, C, Y, Q, D, K, R | G, L, M, P, T, C, Q, D, K, R |
| G | 134 | A, V, L, M, W, P, C, Y, Q, E, R | |
| V | 135 | G, A, L, M, P, S, T, Q, E, K, R | G, A, L, M, P, S, T, Q, E, K, R |
| F | 136 | G, A, V, I, M, P, S, T, C, Y, N, CXK, R | L, M, C, Y, R |
| T | 137 | G, A, V, L, W, P, S, E, R | S |
| L | 138 | G, A, V, M, W, P, S, Q, D, K, R | V, M, S, Q |
| L | 139 | G, A, V, W, F, P, S, T, C, Y, Q, E, K, R, H | A, V |
| G | 140 | A, L, M, W, P, T, C, Q, D, R | |
| D | 141 | G, V, L, M, W, S, T, N, R | G, V, M, S, T, N, R |
| G | 142 | A, V, L, P, T, C, E, K, R | A, V |
| G | 143 | A, V, L, W, S, Q, E, R | A, W, S, Q, E |
| F | 144 | G, A, V, L, W, P, S, Q, D, K, R | G, A, V, L, W, P, S, Q, K, R |
| I | 145 | G, A, V, M, W, C, Q, E, R, H | G, A, V, M, W, C, Q, E, R, H |
| N | 146 | G, L, M, W, P, S, T, E, K, R | |
| W | 147 | G, V, M, P, S, C, E, R | |
| A | 148 | G, V, L, I, M, W, P, S, Y, Q, K, R | G, S |
| W | 149 | G, A, V, L, F, S, T, N, E | |
| G | 150 | A, V, L, I, W, S, T, Y, Q, E, K, R | I, Q |
| G | 151 | V, L, M, W, S, D, E, R | S |
| F | 152 | G, A, V, L, M, W, P, S, T, C, Q, D, R, H | W |
| V | 153 | G, A, L, I, M, W, P, S, N, E, K, R | A, L, I, P |
| Q | 154 | G, V, L, W, F, P, S, T, N, D, E, K, R, H | G, V, L, W, F, P, S, T, N, D, E, K, R, H |
| E | 155 | G, V, L, M, F, P, S, N, Q, K, R | G, V, L, M, F, S, N, Q, K, R |
| V | 156 | G, A, L, M, F, P, S, Q, E, K, R | A, L, M, F, S, Q, E, K, R |
| A | 157 | G, V, L, I, M, W, P, S, T, N, Q, E, K, R, H | G, V, L, I, M, W, S, T, N, Q, E, K, R, H |
| G | 158 | A, V, W, P, T, C, E, K, R | A, V, W, P, T, C, E, K, R |
| K | 159 | G, A, V, L, I, W, P, S, T, Y, Q, R, H | G, A, V, L, P, S, T, Y, Q, R,H |
| R | 160 | G, A, V, L, I, M, F, S, T, C, Y, E, K | I, M, Y, K |
| I | 161 | G, A, V, L, M, W, F, P, S, T, Y, Q, D, E, R | A, V, L |
| H | 162 | G, A, L, I, W, F, P, S, T, C, Y, Q, K, R | G, A, L, I, W, F, S, T, C, Y, Q, K, R |
| F | 163 | A, L, S, T, C, Y, D, E | |
| R | 164 | G, V, L, I, M, W, F, P, S, T, Y, N, D | V, L, I, M, S, T, N, D |
| L | 165 | G, V, I, M, W, F, P, S, N, Q, E, K, R | G, V, I, M, W, F, P, S, N, Q, E, K, R |
| P | 166 | G, A, V, L, I, M, W, S, T, C, Y, N, Q, D, E, K, R, H | A, T, C, Q |
| P | 167 | G, A, V, L, M, W, S, T, C, Y, N, D, R, H | A, N, D |
| G | 168 | A, V, L, M, W, P, S, T, Q, R, H | |
| A | 169 | G, V, L, M, W, F, S, T, C, N, Q, R, H | G, S, T, C, Q |
| L | 170 | A, V, I, M, P, S, T, Y, Q, R, H | A, V, I, M, S, T, Y, Q, R, H |
| P | 171 | G, A, V, M, W, S, T, C, E, R | G, A, V, M, W, S, T, C, E, R |

### Example 19 Identification of Amino Acid Positions Affecting the Protein Stability and Function of IPD103

[0441] Additional mutagenesis was performed on selected positions within IPD103lib11reary-54. Protein was purified from the single mutants and screened for activity on CEW. Table 12 summarizes additional amino acid substitutions identified, amino acid substitutions allowing retention of insecticidal activity, and amino acid substitutions resulting in reduced protein yields from E. coli.

TABLE 12

| | | Identified | Active | Reduced Expression |
|---|---|---|---|---|
| AA | Position | substitutions | substitutions | substitutions |
| A | 002 | F, H, M, W, Y | F, H, M, W, Y | |
| A | 011 | D, F, L, M, N, Q | D, F, L, M, N, Q | |
| T | 018 | A, F, H, K, N, Y | A, H, K, N | |
| M | 020 | C, G, N, Y | | |
| D | 021 | E, I, M, P, T, Y | E, P, T | M |
| G | 027 | E, F, H, N, Q, T, Y | | F |
| D | 031 | I, K, P, Q | | |
| A | 034 | D, N, P | D, N, P | |
| A | 065 | C, I, K, N, P, Y | C, I, N, Y | K, P |
| R | 066 | E, F, M, Q, S, W, Y | E, F, M, S, W, Y | |
| F | 068 | C, D, E, I, M, P, Y | C, I, M | |
| S | 070 | A, D, E,H, I, L,M, P, V | A, D, E, H, L, M, V | I, P |
| N | 094 | C, F, I, K, S | | I, K |
| H | 104 | E, Q, T, W, Y | E, Q, T, W | |
| G | 140 | E, F, H, I, K, N, S, V, Y | S | I, N, V |
| W | 147 | A, D, F, H, I, K, L, N, Q, T, Y | F | D, K |
| W | 149 | C, D, H, I, K, M, P, Q, Y | | C, D, H, K, M, Q |
| Q | 154 | A, C, I, M | A | C, I, M |
| E | 155 | A, C, D, I, T, W | A, C, D, I, T, W | |
| G | 168 | C, D, E, F , I, K, N, Y | F | |

### Example 20 Transgene Insecticidal Stacks

[0442] Molecular stacks and breeding stacks can be constructed utilizing the polynucleotide sequences encoding the pesticidal proteins of the disclosure, including IPD103 (SEQ ID NO: 2), PtlP-83Cb (SEQ ID NO: 45), Cry B variant IP1B-34 (SEQ ID NO: 91), a Cry1Ca polypeptide, and a Cry1D polypeptide. Exemplary stacks and the activity spectrums of the selected stack components against selected insect species: soybean looper (SBL); Velvetbean caterpillar (VBC); cotton bollworm (CBW); southern armyworm (SAW); corn earworm (CEW); fall armyworm (FAW); grasshopper armyworm (GAW); and tobacco budworm (TBM).

TABLE 13

| | Primary Tier1 | | | | Prim. Tier2 | | | Sec |
|---|---|---|---|---|---|---|---|---|
| Active | SBL | VBC | CBW | SAW | CEW | FAW | GAW | TBW |
| IPD103Aa | +++ | +++ | ND | − | +++ | − | ND | +++ |
| IPD083Cb | +++ | +++ | +++ | +++ | +++ | +++ | ++ | +++ |
| Cry1B.34 | +++ | +++ | − | +++ | − | +++ | +++ | − |
| IPD103Aa | +++ | +++ | ND | − | +++ | − | ND | +++ |
| IPD083Cb | +++ | +++ | +++ | +++ | +++ | +++ | ++ | +++ |
| Cry1Ca | +++ | +++ | − | +++ | − | ++ | +++ | − |
| IPD103Aa | +++ | +++ | ND | − | +++ | − | ND | +++ |
| Cry1D | +++ | − | +++ | +++ | +++ | +++ | − | +++ |
| IPD083Cb | +++ | +++ | +++ | +++ | +++ | +++ | ++ | +++ |
| IPD103Aa | +++ | +++ | ND | − | +++ | − | ND | +++ |
| Cry1D | +++ | − | +++ | +++ | +++ | +++ | − | +++ |
| Cry1B.34 | +++ | +++ | − | +++ | − | +++ | +++ | − |
| IPD103Aa | +++ | +++ | ND | − | +++ | − | ND | +++ |
| Cry1D | +++ | − | +++ | +++ | +++ | +++ | − | +++ |
| Cry1Ca | +++ | +++ | − | +++ | − | ++ | +++ | − |
| IPD103Aa | +++ | +++ | ND | − | +++ | − | ND | +++ |
| Cry1D | +++ | − | +++ | +++ | +++ | +++ | − | +++ |
| IPD083Cb | +++ | +++ | +++ | +++ | +++ | +++ | ++ | +++ |
| IPD103Aa | +++ | +++ | ND | − | +++ | − | ND | +++ |
| IPD083Cb | +++ | +++ | +++ | +++ | +++ | +++ | ++ | +++ |
| “+++” = | | | | | | | | |
| good control | | | | | | | | |
| “++” = | | | | | | | | |
| fair control | | | | | | | | |
| “−” = | | | | | | | | |
| no control | | | | | | | | |
| ND = | | | | | | | | |
| not determined | | | | | | | | |

### Example 21—Identification of IPD103Aa Homologs

[0443] Additional IPD03Aa homologs were identified as described in Example 4. The IPD103Aa homologs, the organism they were identified from, the DNA sequence identifier, protein sequence identifies, and the CEW activity are shown in Table 14.

TABLE 14

| ID | Source | Organism | DNA | Protein | CEW Activity |
|---|---|---|---|---|---|
| IPD103Cd | NY-111 | Polystichum munitum | SEQ ID NO: 242 | SEQ ID NO: 252 | + |
| IPD103Bp | NY-167 | Polystichum aculeatum | SEQ ID NO: 243 | SEQ ID NO: 253 | + |
| IPD103Br | NY-167 | Polystichum aculeatum | SEQ ID NO: 244 | SEQ ID NO: 254 | + |
| IPD103Dc | LW14145 | Osmunda claytoniana | SEQ ID NO: 245 | SEQ ID NO: 255 | + |
| IPD103Dd | MB0389 | Osmunda cinnamomea | SEQ ID NO: 246 | SEQ ID NO: 256 | + |
| IPD103De | MB0389 | Osmunda cinnamomea | SEQ ID NO: 247 | SEQ ID NO: 257 | + |
| IPD103Bl | NY26 | Asplenium ebenoides | SEQ ID NO: 248 | SEQ ID NO: 258 | + |
| IPD103Bm | NY26 | Asplenium ebenoides | SEQ ID NO: 249 | SEQ ID NO: 259 | + |
| IPD103Bo | NY54 | Gymnocarpium dryopteris | SEQ ID NO: 250 | SEQ ID NO: 260 | + |
| IPD103Af | NY49 | Colysis pteropus | SEQ ID NO: 251 | SEQ ID NO: 261 | + |

[0444] The above description of various illustrated embodiments of the disclosure is not intended to be exhaustive or to limit the scope to the precise form disclosed. While specific embodiments of and examples are described herein for illustrative purposes, various equivalent modifications are possible within the scope of the disclosure, as those skilled in the relevant art will recognize. The teachings provided herein can be applied to other purposes, other than the examples described above. Numerous modifications and variations are possible in light of the above teachings and, therefore, are within the scope of the appended claims.

[0445] These and other changes may be made in light of the above detailed description. In general, in the following claims, the terms used should not be construed to limit the scope to the specific embodiments disclosed in the specification and the claims.

[0446] The entire disclosure of each document cited (including patents, patent applications, journal articles, abstracts, manuals, books or other disclosures) in the Background, Detailed Description, and Examples is herein incorporated by reference in their entireties.

[0447] Efforts have been made to ensure accuracy with respect to the numbers used (e.g. amounts, temperature, concentrations, etc.) but some experimental errors and deviations should be allowed for. Unless otherwise indicated, parts are parts by weight, molecular weight is average molecular weight; temperature is in degrees centigrade; and pressure is at or near atmospheric.

The application's sequence listing, which the Patent Office published only in electronic form, follows.

SEQUENCE LISTING (261 sequences)

SEQ ID NO: 1 - DNA, 516 bp, Athyrium niponicum
atggcggacaaagcagcagcagcagctagagaagctgaagaagaggtggagacgacgatggacgagactgaggcggtggggacgcacctggacttcttgggcgcggacgtgaagttgcaaccccgcaacatcatcaccgtggaggtggacgcggctgccgtaatccaacagatcagagagatcttccagacaatggcgcgtcacttcaactctacgagggtggtgcgggatgaagccatcaagggcattcgagaccacttcagggccgccgtcccgactcgcaacgtggtggtcattcacactcagcacgttcacacactggtgggcttggagcacacccacctcgtcttgcagaccggcatcttcaaaaaggtccccgtcgacatctatgtcttcaagtccggcgtcttcaccaaccttggagacggaggcttcatcaactgggcatggggtggcttcgtcgaccaggtcgtcggcaagcgtatccacttccgcttgccccccggggcgctccct

SEQ ID NO: 2 - protein, 172 aa, Athyrium niponicum
MADKAAAAAREAEEEVETTMDETEAVGTHLDFLGADVKLQPRNIITVEVDAAAVIQQIREIFQTMARHFNSTRVVRDEAIKGIRDHFRAAVPTRNVVVIHTQHVHTLVGLEHTHLVLQTGIFKKVPVDIYVFKSGVFTNLGDGGFINWAWGGFVDQVVGKRIHFRLPPGALP

SEQ ID NO: 3 - DNA, 513 bp, Athyrium niponicum
atggcggaccaagcagcagcagctagagaagctgaagaagaggtggagacgacgatggacgagactgaggcggtggggacgcacctggacttcttgggcgcggacgtgaagttgcaaccccgcaacatcatcaccgtggaggtggacgccgctgccgtaatccaacagatcagagagatcttccagacaatggcgcgtcacttcaactctacgagggtggtgcgggatgaagccatcaagggcattcgagaccacttcagggccgccgtcccgactcgcaacgtggtggtcattcacactcagcacgttcacacactggtgggcttggagcacacccacctcgtcttgcagaccggcatcttcaaaaaggtccccgtcgacatctatgtcttcaagtccggcgtcttcaccaaccttggagacggaggcttcatcaactgggcatggggtggcttcgtcgaccaggtcgtcggcaagcgtatccacttccgcttgccccccggggcgctccct

SEQ ID NO: 4 - protein, 171 aa, Athyrium niponicum
MADQAAAAREAEEEVETTMDETEAVGTHLDFLGADVKLQPRNIITVEVDAAAVIQQIREIFQTMARHFNSTRVVRDEAIKGIRDHFRAAVPTRNVVVIHTQHVHTLVGLEHTHLVLQTGIFKKVPVDIYVFKSGVFTNLGDGGFINWAWGGFVDQVVGKRIHFRLPPGALP

SEQ ID NO: 5 - DNA, 513 bp, Platycerium wandae
atggccgaaccagcagcagcagctagagaagctgaagaagaggtggagacgacgatggacgagactgaggcggtggggacgcacctggacttcttgggcgcggacgtgaagttgcaaccccgcaacatcatcaccgtggaggtggacgcggctgccgtaatccaacagatcagagagatcttccagacaatggcgcgtcacttcaactctacgagggtggtgcgggatgaagccatcaagggcattcgagaccacttcagggccgccgtcccgactcgcaacgtggtggtcattcacactcagcacgttcacacactggtgggcttggagcacacccacctcgtcttgcagaccggcatcttcaaaaaggtccccgtcgacatctatgtcttcaagtccggcgtcttcaccaaccttggagacggaggcttcatcaactgggcatggggtggcttcgtcgaccaggtcgtcggcaagcgtatccacttccgcttgccccccggggcgctccct

SEQ ID NO: 6 - protein, 171 aa, Platycerium wandae
MAEPAAAAREAEEEVETTMDETEAVGTHLDFLGADVKLQPRNIITVEVDAAAVIQQIREIFQTMARHFNSTRVVRDEAIKGIRDHFRAAVPTRNVVVIHTQHVHTLVGLEHTHLVLQTGIFKKVPVDIYVFKSGVFTNLGDGGFINWAWGGFVDQVVGKRIHFRLPPGALP

SEQ ID NO: 7 - DNA, 510 bp, Pteris ensiformis
atggccgaccaaggagcagcagctagagaagctgaggaagaggtggagacgacgatggacgagacggaggcggtggggacgcacctggactttttggcggacgtgaaggtgcagccccgcaacatcatcaccgtggaggtggacgccgctgccgtaatccaacagatcagagagatcttccaaaccatggcacgtcacttcaactctacgagggtggtgcgggatgaagccattaagggcattcgagaccacttcagggccgccgttccgactcgcaacgtggtggtcattcacactcagcacgttcaaacactggtggccgtggagcacagccacatcgtcttgcagaccggcatcttcaagaaggtccccgtcgacatctatgttttcaagtccggcgtcttcaccaaccttggagacggaggctacatcaactgggcatggggtggcttcgtagaccaggtcgtcggcaagcgtatccacttccgcttgccccccggggcgctccct

SEQ ID NO: 8 - protein, 170 aa, Pteris ensiformis
MADQGAAAREAEEEVETTMDETEAVGTHLDFLADVKVQPRNIITVEVDAAAVIQQIREIFQTMARHFNSTRVVRDEAIKGIRDHFRAAVPTRNVVVIHTQHVQTLVAVEHSHIVLQTGIFKKVPVDIYVFKSGVFTNLGDGGYINWAWGGFVDQVVGKRIHFRLPPGALP

SEQ ID NO: 9 - DNA, 507 bp, Pteris ensiformis
atggccgaccaagctgcagctagagaagctgaggaagaggtggagacgacgatggacgagacggaggcggtggggacgcacctggactttttggcggacgtgaaggtgcagccccgcaacatcatcaccgtggaggtggacgccgctgccgtaatccaacagatcagagagatcttccaaaccatggcacgtcacttcaactctacgagggtggtgcgggatgaagccattaagggcattcgagaccacttcagggccgccgttccgactcgcaacgtggtggtcattcacactcagcacgttcaaacactggtggccgtggagcacagccacatcgtcttgcagaccggcatcttcaagaaggtccccgtcgacatctatgttttcaagtccggcgtcttcaccaaccttggagacggaggctacatcaactgggcatggggtggcttcgtagaccaggtcgtcggcaagcgtatccacttccgcttgccccccggggcgctccct

SEQ ID NO: 10 - protein, 169 aa, Pteris ensiformis
MADQAAAREAEEEVETTMDETEAVGTHLDFLADVKVQPRNIITVEVDAAAVIQQIREIFQTMARHFNSTRVVRDEAIKGIRDHFRAAVPTRNVVVIHTQHVQTLVAVEHSHIVLQTGIFKKVPVDIYVFKSGVFTNLGDGGYINWAWGGFVDQVVGKRIHFRLPPGALP

SEQ ID NO: 11 - DNA, 546 bp, Platycerium wandae
atgagagagcgagagcgagagcgagagagagagatggccgaaccagcagcagcagcagctaaaaaagctgaagaagaggtggagatatttatggacgacactgaggcggtggggacgcatctggacttcttggcgggcttgaaggtgcagccccgcaagatcatcaccgtggaggtggaccccgctgccgtaatccagcagatcagggagatcttccaaaccatggcacgtcacttcaactcgacgacggtggtgcgggatgaagccatcaagggcattcgagaccacttcagggccgccgttccgactcgcaacgtggtggtcgttcacactcagcacattcacaccctggagggcttggagcacaccaaccttgtcttgcagaccggcctcttcagaaaggtccccgtcgacatctacgtcttcaagtctggcgtcttcaccctccttggagatggaggcttcatcaactgggcgtggggtggcttcgtagagcaggtcgtcggcaagcgtatccacttccgcttaccccctggggcgctccct

SEQ ID NO: 12 - protein, 182 aa, Platycerium wandae
MREREREREREMAEPAAAAAKKAEEEVEIFMDDTEAVGTHLDFLAGLKVQPRKIITVEVDPAAVIQQIREIFQTMARHFNSTTVVRDEAIKGIRDHFRAAVPTRNVVVVHTQHIHTLEGLEHTNLVLQTGLFRKVPVDIYVFKSGVFTLLGDGGFINWAWGGFVEQVVGKRIHFRLPPGALP

SEQ ID NO: 13 - DNA, 513 bp, Platycerium wandae
atggccgaaccagcagcagcagcagctaaaaaagctgaagaagaggtggagatatttatggacgacactgaggcggtggggacgcatctggacttcttggcgggcttgaaggtgcagccccgcaagatcatcaccgtggaggtggaccccgctgccgtaatccagcagataagagagatctttcaaaccctggcacgtcacttcaactcgacgacggtggtgcgggatgaagccatcaagggcattcgagaccacttcagggccgccgttccgactcgcaacgtggtggtcgttcacactcagcacattcacaccctggagggcttggagcacaccaaccttgtcttgcagaccggccgcttcagaaaggtccccgtcgacatctacgtcttcaagtctggcgtcttcaccctccttggagatggaggcttcatcaactgggcgtggggtggcttcgtagagcaggtcgtcggcaagcgtatccacttccgcttaccccctggggcgctccct

SEQ ID NO: 14 - protein, 171 aa, Platycerium wandae
MAEPAAAAAKKAEEEVEIFMDDTEAVGTHLDFLAGLKVQPRKIITVEVDPAAVIQQIREIFQTLARHFNSTTVVRDEAIKGIRDHFRAAVPTRNVVVVHTQHIHTLEGLEHTNLVLQTGRFRKVPVDIYVFKSGVFTLLGDGGFINWAWGGFVEQVVGKRIHFRLPPGALP

SEQ ID NO: 15 - DNA, 513 bp, Athyrium filix-femina
atggccgacaaagcgcctcctcctgctagagaagcagaagaagaggtggaggagacgatggacgagactgaggcagtggggacgcacctggacttgatagcgcacctgagtgtgcaaccccgcggcatcatcaccgtggaggtggaccccgccgctgtaatccaacagatcagagagatcttccaaaccatggcacgtcatttcaactctacgagggtggtacgggatgaagccatcaagggcattcgagaccacttcagggccgccgtcccgactcgcaacgtggtggtcattcacactcaacacgttcacacactggtgggcttggagcacacccacctcgtcttgcagaccggcatctttagaacggtccccgtcgacatctacgtcttcaagtccggcgtgttcaccaacctcggagacggaggcttcatcaactgggcatggggtggcttcgtgaccgaggtcgttgggaagcgtgtccacttccgcttgccccccggggcactccct

SEQ ID NO: 16 - protein, 171 aa, Athyrium filix-femina
MADKAPPPAREAEEEVEETMDETEAVGTHLDLIAHLSVQPRGIITVEVDPAAVIQQIREIFQTMARHFNSTRVVRDEAIKGIRDHFRAAVPTRNVVVIHTQHVHTLVGLEHTHLVLQTGIFRTVPVDIYVFKSGVFTNLGDGGFINWAWGGFVTEVVGKRVHFRLPPGALP

SEQ ID NO: 17 - DNA, 510 bp, Colysis wrightii
atggccgaccaagtagcagcagcgagaggggctgaagaagaggtggagacgacgatggacgagactgaggctgtggggacgcacctggacttcttggcggacgtgaaggtgcaaccccggagcatcatcaccgtggaggtggacgccgctgctgtaatccaacagatcagagagatcttccaaaccatggcacgtcacttcaactctacgagggtggtgcgggacgaagccatcaaggggattcgagaccacttccgggccgccgtcccgactcgcaacgtggtggtcgttcacactcagcacgttcacacactggtgggcctggagcacaccaacatcgtcttgcagaccggcctcttcaaaaaggtccccgtcgacatctatgtcttcaagtccggcgtcttcaccctccttggagacggaggcttcatcaactgggcatggggtggcttcgtagaccaggtcgtcggcaagcgtatccacttccgcttgccccccggggcgctccct

SEQ ID NO: 18 - protein, 170 aa, Colysis wrightii
MADQVAAARGAEEEVETTMDETEAVGTHLDFLADVKVQPRSIITVEVDAAAVIQQIREIFQTMARHFNSTRVVRDEAIKGIRDHFRAAVPTRNVVVVHTQHVHTLVGLEHTNIVLQTGLFKKVPVDIYVFKSGVFTLLGDGGFINWAWGGFVDQVVGKRIHFRLPPGALP

SEQ ID NO: 19 - DNA, 513 bp, Nephrolepis falcata
  misc_feature (484)..(484): n is a, c, g, or t
atggccgacccagcaacagcagctagagaagctgaagaagaggtgcaggagactttgatggacgagactgaggcggtggggacgcacctggacttcgtggcgggcttggaggtgcaaccccgcaaggtcatcaccgtggaggtggacgccgctgccgtaatccagcagatcagagagatcttccgaaccatggcaagtcacttcaactcgacgagggtggtgcgggatgaagccatcaagggcattcgagaccacttcagggccgccgtcccgactcgcaacgtggtggtcgttcacacccagcacattcacacactggagggcttggagcacaccaacctcgtcttgcagaccggcctcttcaaaaaggtccccgtcgacatctacgtcttcaagtccggcgtcttcaccctccttggagacggaggcttcatcaactgggcatggggtggcttcgtacaggaggtcgccggcaagcgtatcnacttccgcttgccccccggggcgctccct

SEQ ID NO: 20 - protein, 171 aa, Nephrolepis falcata
  misc_feature (162)..(162): Xaa can be any naturally occurring amino acid
MADPATAAREAEEEVQETLMDETEAVGTHLDFVAGLEVQPRKVITVEVDAAAVIQQIREIFRTMASHFNSTRVVRDEAIKGIRDHFRAAVPTRNVVVVHTQHIHTLEGLEHTNLVLQTGLFKKVPVDIYVFKSGVFTLLGDGGFINWAWGGFVQEVAGKRIXFRLPPGALP

SEQ ID NO: 21 - DNA, 537 bp, Nephrolepsis cordifolia
atgcagagagagagagagagagagatggccgaccaagctgcagcagcagctagagaagctgaagaagaggtggaggtttttatggacgagactgaggcggtggggacgcacctggacttcttggcgggcttgaacgttcaaccccgcaaggtcatcaccgtggaggtggacgccgctgccgtaatccaacagatcagagagatcttccaaaccatggcacgtcacttcaactcgacgagggtggtgcgggatgaagccatcaagggcattcgcgaccacttcagggccgccgtcccgactcgcaacgtggtggtcgttcacactcagcacattcacactctggtggacgtggagcacaccaacctcgtcttgcagaccggcatcttcaaaaaggtccccgtcgacatctatgtcttcaagtccggcgtcttcaccctccttggagacggcggcttcatcaactgggcatggggtggcttcgtagaccaggttgacggcaagcgtatccacttccgcttgccccccggggcgctccct

SEQ ID NO: 22 - protein, 179 aa, Nephrolepsis cordifolia
MQREREREMADQAAAAAREAEEEVEVFMDETEAVGTHLDFLAGLNVQPRKVITVEVDAAAVIQQIREIFQTMARHFNSTRVVRDEAIKGIRDHFRAAVPTRNVVVVHTQHIHTLVDVEHTNLVLQTGIFKKVPVDIYVFKSGVFTLLGDGGFINWAWGGFVDQVDGKRIHFRLPPGALP

SEQ ID NO: 23 - DNA, 513 bp, Polystichium tsus-simense
atggccgacaaagtagcagcagcgcctcctcctgctagagaagcagaagaagaggtggaggagacgatggacgagactgaggcggtggggacgcacctggacttgatagcgaccctaccgcgtggcatcatcaccgtggaggtggactccgccgccgtaatccaacagatcagagagatcttccaaaccatggcacgtcatttcaactctacgagggtggtaagggatgaagccatcaagggcattcgagaccacttcagggccgccatcccgactcgcaacgtggtggtcattcacactcaacacgttcacacactggtgggcttggagcacacccacctcgtcttgcagaccggcatctttaaaaaggtccccgtcgacgtctacgtcttcaagtccggcgtgctcaccaacctcggagacggaggcttcatcaactgggcatggggtggcttcgtgaccgaggtcgttgggaagcgtgtccacttccgcttgccccccggggcgctccct

SEQ ID NO: 24 - protein, 171 aa, Polystichium tsus-simense
MADKVAAAPPPAREAEEEVEETMDETEAVGTHLDLIATLPRGIITVEVDSAAVIQQIREIFQTMARHFNSTRVVRDEAIKGIRDHFRAAIPTRNVVVIHTQHVHTLVGLEHTHLVLQTGIFKKVPVDVYVFKSGVLTNLGDGGFINWAWGGFVTEVVGKRVHFRLPPGALP

SEQ ID NO: 25 - DNA, 513 bp, Polystichium tsus-simense
atggccgacaaagtagcagcagcgcctcctcctgctagagaagcagaagaagaggtggaggagacgatggacgagactgaggcggtggggacgcacctggacttgatagcaaccctaccgcgtggcatcatcaccgtggaggtggacggcgccgccgtaatccaacagatcagagagatcttccaaaccatggcacgtcatttcaactctacgagggtggtaagggatgaagccatcaagggcattcgagaccacttcagggccgccatcccgactcgcaacgtggtggtcattcacactcaacacgttcacacactggtgggcttggagcacacccacctcgtcttgcagaccggcatctttaaaaaggtccccgtcgacgtctacgtcttcaagtccggcgtgctcaccaacctcggagacggaggcttcatcaactgggcatggggtggcttcgtgaccgaggtcgttgggaagcgtgtccacttccgcttgccccccggggcgctccct

SEQ ID NO: 26 - protein, 171 aa, Polystichium tsus-simense
MADKVAAAPPPAREAEEEVEETMDETEAVGTHLDLIATLPRGIITVEVDGAAVIQQIREIFQTMARHFNSTRVVRDEAIKGIRDHFRAAIPTRNVVVIHTQHVHTLVGLEHTHLVLQTGIFKKVPVDVYVFKSGVLTNLGDGGFINWAWGGFVTEVVGKRVHFRLPPGALP

SEQ ID NO: 27 - DNA, 519 bp, Thelypteris palustris
atggccgacaaagtagcagcagcttctcgggctcaaggagcagaagaggtggaggatctgatggacgagacagaggcggtggggacgcacctggactgcatgggcggcgacgtgaaggtgcaagcacgcggcatcatcaccgtggaggtggaccccgccgccgtaatccaacagatcagagagatcttccaaaccctggcacgtcactacaactctacgagggtggtacgggatgcagccatcaaggccattcgagaccacttcagggccgccgtcccgactcgcaacgtggtggtcatccacactcaacacgttcacacactggcggacgtagagcacagccacctcgtcttgcagaccggcatcttcaagaaggtccccgtcgacatctacgtcttcaagtccggcgtgttcaccaacctcggcgacggaggcttcatcaactgggcatggggtggctacgtgacagaggtcgttgggaagcgtatccacttccgcttgcccccgggggcactccct

SEQ ID NO: 28 - protein, 173 aa, Thelypteris palustris
MADKVAAASRAQGAEEVEDLMDETEAVGTHLDCMGGDVKVQARGIITVEVDPAAVIQQIREIFQTLARHYNSTRVVRDAAIKAIRDHFRAAVPTRNVVVIHTQHVHTLADVEHSHLVLQTGIFKKVPVDIYVFKSGVFTNLGDGGFINWAWGGYVTEVVGKRIHFRLPPGALP

SEQ ID NO: 29 - DNA, 513 bp, Athyrium filix-femina
atggccgacaaagcgcctcctcctgctagagaagcagaagaagaggtggaggagacgatggacgagactgaggcagtggggacgcacctggacttgatagcgcacctgagtgtgcaaccccgcggcatcatcaccgtggaggtggaccccgccgctgtaatccaacagatcagagagatcttccaaaccatggcacgtcatttcaactctacgagggtggtacgggatgaagccatcaagggcattcgagaccacttcagggccgccgtcccgactcgcaacgtggtggtcattcacactcaacacgttcacacactggtgggcttggagcacacccacctcgtcttgcagaccggcatctttagaacggtccccgtcgacatctacgtcttcaagtccggcgtgctcaccaacctcggagacggaggcttcatcaactgggcatggggtggcttcgtgaccgaggtcgttgggaagcgtgtccacttccgcttgccccccggggcactccct

SEQ ID NO: 30 - protein, 171 aa, Athyrium filix-femina
MADKAPPPAREAEEEVEETMDETEAVGTHLDLIAHLSVQPRGIITVEVDPAAVIQQIREIFQTMARHFNSTRVVRDEAIKGIRDHFRAAVPTRNVVVIHTQHVHTLVGLEHTHLVLQTGIFRTVPVDIYVFKSGVLTNLGDGGFINWAWGGFVTEVVGKRVHFRLPPGALP

SEQ ID NO: 31 - DNA, 513 bp, Nephrolepis cordifolia
atggccgaccaagctgcagcagcagctagagaagctgaagaagaggtggaggtttttatggacgagactgaggcggtggggacgcacctggacttcttggcgggcttgaacgttcaaccccgcaaggtcatcaccgtggaggtggacgccgctgccgtaatccaacagatcagagagatcttccaaaccatggcacgtcacttcaactcgacgagggtggtgcgggatgaagccatcaagggcattcgcgaccacttcagggccgccgtcccgactcgcaacgtggtggtcgttcacactcagcacattcacactctggtggacgtggagcacaccaacctcgtcttgcagaccggcatcttcaaaaaggtccccgtcgacatctatgtcttcaagtccggcgtcttcaccctccttggagacggcggcttcatcaactgggcatggggtggcttcgtagaccaggttgacggcaagcgtatccacttccgcttgccccccggggcgctccct

SEQ ID NO: 32 - protein, 171 aa, Nephrolepis cordifolia
MADQAAAAAREAEEEVEVFMDETEAVGTHLDFLAGLNVQPRKVITVEVDAAAVIQQIREIFQTMARHFNSTRVVRDEAIKGIRDHFRAAVPTRNVVVVHTQHIHTLVDVEHTNLVLQTGIFKKVPVDIYVFKSGVFTLLGDGGFINWAWGGFVDQVDGKRIHFRLPPGALP

SEQ ID NO: 33 - DNA, 546 bp, Platycerium wandae
atgagagagcgagagcgagagcgagagagagagatggccgaaccagcagcagcagcagctaaaaaagctgaagaagaggtggagatatttatggacgacactgaggcggtggggacgcatctggacttcttggcgggcttgaaggtgcagccccgcaagatcatcaccgtggaggtggaccccgctgccgtaatccagcagataagagagatctttcaaaccctggcacgtcacttcaactcgacgacggtggtgcgggatgaagccatcaagggcattcgagaccacttcagggccgccgttccgactcgcaacgtggtggtcgttcacactcagcacattcacaccctggagggcttggagcacaccaaccttgtcttgcagaccggccgcttcagaaaggtccccgtcgacatctacgtcttcaagtctggcgtcttcaccctccttggagatggaggcttcatcaactgggcgtggggtggcttcgtggagcaggtcgtcggcaagcgtatccacttccgcttaccccctggggcgctccct

SEQ ID NO: 34 - protein, 182 aa, Platycerium wandae
MREREREREREMAEPAAAAAKKAEEEVEIFMDDTEAVGTHLDFLAGLKVQPRKIITVEVDPAAVIQQIREIFQTLARHFNSTTVVRDEAIKGIRDHFRAAVPTRNVVVVHTQHIHTLEGLEHTNLVLQTGRFRKVPVDIYVFKSGVFTLLGDGGFINWAWGGFVEQVVGKRIHFRLPPGALP

SEQ ID NO: 35 - DNA, 513 bp, Tectaria milnei
atggccgatgaggtagctggtcatcacggtcctgcctgtgaagaagaagaagaagagatgctgatggatgagactgaggcggtgggggtgcatgcaatcgatggcctgccggtgcaaaaccgtagcatcattaccgtggaggtggacgccgcagccgtaatccagcagatcagagagatatttgcatcgatgatcaagcactacaactccacgcgagtggtgcgggatgaggccatcaagtccattcgagaccacttcaggctcgccgtgcccactcgcaacgtggtggtgattcacactcagcacgttcacacactggacgccgtggagagctcgcacctggtcttgcgaaccggtctattcaaaaaggtgccagtggacatcttcgtcttcaagtctggcgtgttcaccaacctgggagacgggggcttcatcaactgggcatggggtggctacggcgtcaaccacactgccaagcgtgttgtcttcagtcggccccctggggcgctccct

SEQ ID NO: 36 - protein, 171 aa, Tectaria milnei
MADEVAGHHGPACEEEEEEMLMDETEAVGVHAIDGLPVQNRSIITVEVDAAAVIQQIREIFASMIKHYNSTRVVRDEAIKSIRDHFRLAVPTRNVVVIHTQHVHTLDAVESSHLVLRTGLFKKVPVDIFVFKSGVFTNLGDGGFINWAWGGYGVNHTAKRVVFSRPPGALP

SEQ ID NO: 37 - DNA, 375 bp, Davallia tyermannii
atggacgccgctgccgtaatccagcagattagagagatcttccaatccatggcagatgacttcagctcgacgaaggtggtgcgggatgaagccatcaagggcattcgagaccacttcagggccgccgtcccgactcgcaacgtggtggtcgttcacaccccgcacattcacacacagctggtggacgtggagcacaccaaactcgtcttgaagaccggcatcttcgaaaaggtccccgtcgacatctatgtcttcaagtccggcgtcttcaccctccttggagacggaggctacaacaactgggcatggggtggcttcgtagaccaggtcgtcggcaagcgtatccacttccgcttgccccccggggcgctccct

SEQ ID NO: 38 - protein, 125 aa, Davallia tyermannii
MDAAAVIQQIREIFQSMADDFSSTKVVRDEAIKGIRDHFRAAVPTRNVVVVHTPHIHTQLVDVEHTKLVLKTGIFEKVPVDIYVFKSGVFTLLGDGGYNNWAWGGFVDQVVGKRIHFRLPPGALP

SEQ ID NO: 39 - protein, 867 aa, Adiantum pedatum
MALVDYGKLFEDLNQISMGVLDRVEFSEVMVIHRMYVRLADLNVGQLEGAEKVKRLYVFADVVELPVVEWRWPPQIPGSVTVIILCRLLQWPTDGRQSDTELHLTFMKLHAIQREENRWEITAADGMNWGVYIHAEEVQVGVLTMSWSSVLRVSALRSVITSGFRAVSVFEVPGSVRSTLGATLRPDHALYSTTMQATPNASHISAFNLRIVSPSAYRVCPLQNDTDTYLGIPADVAAVLPVDVVTDPNILLGMQTTVHIAELVKACHPSPDVVSAVGEHLNWLNKLLLPLKESTQLQGSESYKECLALLGRVHAAMKMVRIGLVVPQLQYRMYGSLINQMAQVAQNYDREFKQFKLFIIQNQILGSYLLQQNRAFAERELQMESFHAAVISQRREELDNTFAKMDRLSGQMEAESSAMEQAKKEMDEGLRQFQNRQVANALFAVLSAVAQIGLAFLTAGATAPGAVASAGQAVSIAGQAAQGLRRVVEILEQLEAVMEVVAAVKDLVDSLEQVGQIVDAPVMPELPSEADWSIFVNEVEAVAEGMPTEVSEVPVWRAKCKNVAALGREMSITAVQMSELQYDIWVQGMMRDMARSQADRLAAIQPADLTNYLEMATQMDMRTTRMLLGLLNILRIQNAALRYEYLLMPTELTTWPLGMDTVGDLLIAQENAALIGLMQLGPSSDFTSRHVVKDIPVNLLLDGEDWEFEIPVQAGMSSFPSSWSRVRIRHLEMHFVKEASGIGGEIIHQPTTQTGTVYILLQGSTIFHDRRRDQVLPFQAAAPLNYHYAYRLDTGDSTLTNEPSEQFANKFMQMTPFTRWRLRLSASAKENAGLAFPTATALDSTTQIVITFHVTAIRQIDWRHDEE

SEQ ID NO: 40 - DNA, 2601 bp, Adiantum pedatum
atggctctcgtggattacggcaagcttttcgaggatctgaaccagataagcatgggtgtactggatcgggtagagttttcagaggtgatggtgatccacaggatgtatgtgaggctagctgatctgaatgtggggcagctcgagggagccgagaaagtgaagcggttgtatgtgtttgcggacgtggtggagctaccagtcgtggaatggcggtggccgccgcaaataccaggatcggtgacggtgatcatattgtgtcgtcttcttcaatggccaactgatgggaggcagtcggacaccgagctccacctgacattcatgaagttgcatgccatacaacgagaggaaaatcggtgggagataaccgcagcagatggcatgaactggggagtttacatacacgcagaggaagtacaggttggcgtgctgacaatgtcatggtcttcggtacttagagtttcggcacttcgctctgttataacctccggctttcgcgccgttagtgtgtttgaggtaccgggaagtgtaaggtccacccttggagctactttaaggcccgatcacgccttatatagtacaactatgcaagccacacccaacgcatcgcatattagtgcttttaaccttcgcatagtttccccgtcggcatatcgtgtttgtcctctccaaaatgacacagatacctacttaggtattccagcagacgtggcggcagttcttccagtagacgtggtgactgatcctaacatcttgctgggcatgcagacaacggtacacattgcggagctagtcaaggcatgtcatccgtcacccgatgttgtgagcgctgtaggggagcacctgaactggctcaacaaactcttactcccacttaaggaatcgactcagttgcaaggaagcgagtcgtacaaggagtgccttgcactcttgggtcgtgttcacgctgcgatgaagatggtgagaattggcttagtagtgccccagctgcaatacagaatgtacggtagcctcatcaaccaaatggcccaagtagcacaaaactacgaccgagaattcaagcaattcaaattattcatcatccaaaatcaaatccttggcagctatttgctgcagcagaacagggcatttgctgagagggagctgcagatggagagctttcatgctgctgtcatttctcaaagaagggaggagttggacaatacattcgcaaagatggaccgattgagcgggcaaatggaggcagagagtagtgcaatggagcaagccaaaaaggaaatggacgaaggattgaggcagttccagaataggcaagttgcgaacgccctctttgccgttcttagcgctgtagctcagattgggcttgcattccttacggctggtgcaacggctcctggagctgtggcgtcggcggggcaagctgtgagcatagcaggtcaggcggcgcaaggtctgcgaagggtggtggaaattctagagcagctggaggctgtgatggaggttgtggctgctgtgaaggacctcgtggattcattggaacaggtaggtcagattgtggacgcaccggtgatgccggaattgccctcagaggcggactggtccatttttgtgaacgaggtggaggccgtggcagagggcatgccaacggaagtctcggaggttccggtgtggagggccaagtgcaagaatgtggctgcactgggtcgggagatgagcatcacggcagtacagatgtcggagctgcagtatgacatctgggtgcaaggcatgatgcgggatatggctcgaagccaggcagacaggctggccgcaattcaacccgcggaccttaccaactatttggagatggctacccagatggatatgcggactacgaggatgctgctggggctcctcaacatattgcgcatccagaatgcggcgctcaggtacgagtatcttctaatgcccacggagctcacaacatggccactgggtatggataccgtgggtgacttgctcatcgcgcaggagaatgctgcactgataggattaatgcagctagggccctcatctgatttcacgagcaggcatgtggtgaaagacatacctgtgaacttgctgctcgatggcgaggattgggagtttgagattcctgtgcaagctggcatgtccagcttcccttccagctggtctcgcgtccgtattcggcacctggagatgcactttgtgaaggaggccagcggtattggtggtgagattatccaccagcctaccacccagactgggaccgtttacatccttctgcagggttccactatcttccatgaccgcagaagagaccaggtgttgccttttcaggccgctgctccgctcaactaccattacgcgtaccgcctcgacaccggcgactccactctcacaaacgaaccctctgaacagtttgccaacaagttcatgcagatgacacccttcacccgttggaggcttcgtctgtctgcgtccgcaaaagagaatgcaggattagcctttcccacggctacagcacttgactccactacccagattgtcatcactttccatgttacggccatcagacaaattgactggcggcacgacgaagag

SEQ ID NO: 41 - protein, 886 aa, Microsorum musifolium
MEYSSLYGDVNQVSLRFQNMEFSEVMVVHRMHVRLEELDMTGVEGIEKVKRLYVLADVVELPSTATQVFQYLRLPASISAIILCRVLYIPEVDQRPHMAQCSLDFPFMRLHVVGSVHENVGGVMQAFSSDATPSNIGIYLHADRFIYRQATSPASNFVLPLDVRVSFGSSTYSGPTIRPDWQNLNVSNISYGPQHLSKGPPLTSSDSDLQRSDEIELLAQQDVWSPLLHVAFSPTALPGNIPGTQGLFRPSSACSFFHVPPPDVPANVLTDPSIILGMQMNMLIAELVLAAHNSPQVMNVITKHVLWLNKILLQVASPNDDILALLFRIQAFMKMAKQPRFVVPRLQYHMYGSLINRMVQVAQNYDQEFKQLKLFIAQNEILGSYLLQQNRAFAEREKEMSAFHSQVVSMRRSELQSAIQTMDNLSLQMESESEAMNEAQENMVEAIQEYERKLLARALFSVIGAIASVALAFATGGATAPGAVAAAGGAVAAAGRLAAGLQKVVDILQGLQAVMEVVVAIRDIVESLKNMGQLVEAPEMPEMPTDADWLIFVNEVEAVAEQVPTEVAEVPVWKAKCKNVAVLGQAMCTTAAYISELQYQITVEKMLQEIAQRQADRLVGISAADLSSYTEMASQIDMRTTRILLELIKMLYIQNAAIKYEYLYDANEKLNSWPVSMETVWTMLLQQENAALLGLLDLGPTNDFTVTYAVKDIPTKLLVDGFDWNFEIAVEDSAIFPSGWSRVRIRYVELKFDQQGADSSNIVIHQPSTNTGLVYMLLQGSRFLHDRKHEEVMDYEASLGPVYAYAYDLNTGATTLNNIPSQQYANTFMQMTPFNAWRLRLSASAVENQGLVFPTATSPDNTTQISITFYVTAIRRIDHRQEGDVE

SEQ ID NO: 42 - DNA, 2658 bp, Microsorum musifolium
atggaatatagcagcttgtacggtgatgtgaaccaagtgagcctgaggttccagaacatggagttctctgaggtcatggtggtgcatcggatgcatgtgcgcctcgaggagcttgacatgacgggggtggagggcatcgagaaggtgaaacgcctgtacgtgctggcggacgtggtggagctgccttccacagccacccaggtgtttcagtatctgcgccttcctgcctccatttcagcgattatcctctgccgtgttctctatatccctgaagttgatcagaggccccacatggctcaatgctcgctcgacttcccgttcatgcgcctccatgtcgtcggatctgtacacgagaatgttgggggtgttatgcaagccttttcctccgacgccacccccagcaatattggcatctacctccatgctgaccgcttcatctaccgccaggccacatctccggccagcaactttgtcttgcccctggatgtaagggtcagctttggcagctctacctactcgggcccaaccatccgtcccgactggcaaaaccttaatgtctccaacatcagctacgggccacagcatttgtccaagggcccacccctcacatcctcagactccgacttgcagagatctgacgagatcgagctcctggcgcagcaagatgtttggagccctcttttacatgtcgcgtttagcccgactgcactacctggcaacatcccgggtacacaaggactattccgaccctcctctgcatgcagcttcttccatgtgccgccaccggatgtccctgcgaacgtgctcactgatccttccatcatcttgggcatgcaaatgaacatgctcattgccgagcttgtcttggctgctcacaattcgccgcaggtcatgaacgtcatcactaagcatgtgctatggctcaacaagatcttgcttcaggttgcttcacccaatgatgatattttagcactcttgtttcgtatccaagcattcatgaagatggcaaagcaaccgcggtttgtggttccacggttgcagtaccacatgtacggtagccttatcaatcgaatggtgcaagtagcccagaattatgaccaggagttcaagcaactcaagcttttcatcgcacaaaatgagattttgggaagctatttgctacaacaaaatagggcttttgcagaaagggagaaggaaatgagtgcttttcactcgcaggtcgtgtcgatgaggagatctgagcttcagtctgccatacaaacaatggacaatttgagtttgcaaatggaatcagagagtgaggcgatgaacgaagcccaggagaacatggttgaagcaattcaagagtatgaaaggaaattacttgcaagagctctattttctgtgattggggcaatagcaagcgttgctcttgcatttgccactggtggtgcaactgcaccgggggcagtggcagcagccggaggggctgttgctgcagcagggaggttggcagcagggctccaaaaggttgtggacatcctacaaggcttgcaagcggtcatggaggttgtggtagccataagagacatcgtagaatcattgaaaaacatgggtcaactagtagaagctcccgagatgccagagatgccaacggatgcggactggttaatttttgtaaatgaggtggaggcagtggcagagcaagtgccaacagaagtggcagaggtcccagtgtggaaggctaagtgcaagaatgtggctgtgctagggcaagcaatgtgcaccacagcagcatatattagtgagctacagtatcagatcacggtggaaaagatgctacaagagattgcacagcgccaagcagacaggttggtggggatatcagcagcagatctatcgagctacacagagatggcatcacaaatagacatgcgtacaacccgaatcctccttgaactcatcaagatgttgtacattcaaaatgcagcaattaagtatgagtacttgtatgatgctaatgagaagcttaattcatggccagtgagcatggagactgtatggaccatgctcttgcaacaagagaatgcagctctcttgggcttgctagacttggggcccaccaatgatttcactgtaacctatgctgttaaagacatacctaccaagttgttagtagatgggtttgattggaattttgagatcgcggtggaggattctgcaatctttccatcaggatggtctcgtgttcgcatacgatatgttgagcttaaatttgaccaacaaggtgctgatagtagtaacattgtcatccaccagcctagcactaacactggcttagtctacatgctcttacaaggctcccggttcctccatgaccgcaaacatgaggaggtgatggactatgaggcaagcttgggacctgtatatgcatatgcttatgacctcaacactggtgcaaccactctcaacaacatcccctcacagcaatatgccaacacatttatgcaaatgacacccttcaacgcctggagacttcgcctctctgcctctgctgtggaaaatcagggattggtgtttcctacagcaacttctcctgacaatactacccaaatttccatcacattctatgtcactgctattcgacgcatagatcatcgacaagagggtgatgtggag

SEQ ID NO: 43 - protein, 853 aa, Adiantum trapeziforme
MDYSTLYRDLNQISIGVDRVEFSEVMVIHRMYVRLSDLNVGELPGAGRVKRVYVFADVVELAPRATLRDQMHMPGSVTVIVLCRLLQFPIDGSQATTLRLPFMQLHARVIEQNVKSEITATDGMNWGIYIYGEKVERSPLLPSNAILAVWADRCTITSARHNHVNAPGRIISTFTLGSGVTGITSMHGEPSLDPWNGVSLDSASPTAFSALPRQSRNISFTSIPVEVVTDPSILLGMQTTVLIAELVKVCRPPSPDMMSAVAEHALWLNDVLLQVVQNESQLQGTAPYNECLALLGRIECVMKIGRFVSVVPQLQYRMYGNLIKQMAQVAQNYDQEFKQFKLFIVQNQILGSYLLQKNKALADRELQMESFHSAVISQRRQELNTAIAKMERMSLQMEEENRAMEQAQKEMEEGLREFQNRQVARAVFAVLKAVAMIALVFVTAGATAPGAAASAGQAVSIAGQAAQALRRVVEILEGLEAVMEVVAAVKDLVDSLEQVGQIVGAPEMPDMPSEADWSIFVNEIEAVAEGMPTEVSEVPAWKAKCKNMAALGREMSITAVQISELQYEIWVQGLMRDIARSHADRLAAIQPVDLTNHLEMATHMDMRTTSMLIGLLNMLRIQNAALMYEYLLTPTELTVWPLGMDTVANLLIAQENAALVGLIQLGQSSNFTSRHVVKGIPVSLLLDGEDWEFEIPVQAGMSSFPFNWTRVRIRHLEMQFAQEASGGGGGEIIHQPSTRSGIVYILLQGSTIFHDRRRDEVMTFQAADPLNFQYAYRLDTGEATLTNEPSEDFANTFMQMTPFTRWRLRLSASASENAELAFPTATAPDSTTEVVITFHVTAIRQVDWRQEEE

SEQ ID NO: 44 - DNA, 2559 bp, Adiantum trapeziforme
atggattacagcacgctttacagggacctgaaccagataagcatcggtgtggaccgggtagagttctcagaggtgatggtgatccacaggatgtatgtaaggttgtctgatctgaatgtgggggagctccccggagccgggagagtgaagcgggtgtacgtgtttgcggatgtggtggagcttgcaccgcgtgcgacgctgcgggatcagatgcatatgccaggatcggtgacagtgatcgtattgtgtcgtcttcttcaatttccaatcgatgggtcgcaagctacaactctccggctgcctttcatgcagttgcatgccagagtcatagagcaaaatgtaaagtcggagataacagcaacagatggcatgaattggggaatctacatatacggggagaaagtagagaggagcccgctccttcctagcaatgcaatccttgcagtttgggcagatcgctgtactataacctcagcccgtcacaatcatgttaacgcacctgggagaataatatcgactttcacacttgggtcgggagtaacgggtataacctctatgcacggggaacccagtttggacccttggaatggtgtttctctcgactcagcttcccctacggcatttagtgctttacctcgccaaagtaggaatatatccttcacaagtattccagtagaggtggtgactgatcctagcatcttgctgggcatgcagaccaccgtgctcattgcggagctagtcaaggtatgtcgcccaccatcacccgacatgatgagtgctgtagcggagcacgcgctttggctcaatgatgtcttactccaagttgtccagaacgaatctcagttgcaagggactgcgccctacaacgagtgccttgcacttttgggtcgcattgaatgtgtgatgaaaatcgggagatttgtctcagtagtgcctcagctgcaatacagaatgtatggtaacctcatcaaacaaatggcccaagtagcacaaaactacgaccaagaattcaagcaattcaagttattcatcgtccaaaaccaaatccttggcagctatttgcttcagaagaacaaggcattagctgacagggagctgcagatggagagctttcattcagcggtcatttctcaaagaaggcaggagttgaatactgccatcgcaaagatggagcgaatgagcttgcaaatggaggaagagaatagagcaatggagcaagctcaaaaggaaatggaagaaggattgagggagttccagaataggcaagttgcaagggccgtatttgccgttcttaaagccgtagctatgattgcgcttgtattcgtcacggctggtgcgacggctcctggagctgcggcgtccgcggggcaagctgtgagcatagcaggtcaggccgcacaagctctgcgaagggtggtggaaattctagaggggctggaggctgtgatggaggttgtggctgctgtgaaggaccttgtggattcattggaacaggtaggtcagattgtgggggcaccggagatgccggacatgccctcggaggcggactggtccatttttgtgaatgagattgaggccgtggcagaggggatgccgacggaagtctcggaggttccggcatggaaggccaagtgcaagaatatggctgcactgggtagggagatgagcatcacggcagtacagatttctgagctccagtatgagatctgggtgcaaggcttgatgcgggatatagctcgaagccatgcagacaggttggctgcgattcaacctgtggaccttaccaaccatttggagatggccacacacatggatatgcggactacaagtatgctgatagggctcctcaacatgctgcgcatccagaatgcggcactcatgtacgagtaccttctaacacccacggagctcacagtatggccactgggtatggataccgtggccaacttgctcattgcgcaggagaatgctgcactggtgggattaattcagctagggcaatcgtcgaattttacgagcagacatgtggtgaaaggcatacctgtgagcttactgctcgatggtgaggattgggaattcgagatccctgtgcaagctggcatgtccagcttccctttcaactggactcgggtcaggattcggcacctggagatgcaatttgcgcaggaggcgagtggtggtggtggtggcgagattatccaccagccttccacccggtcggggattgtttacatcctcctgcagggctccactatcttccatgaccgcagaagagatgaggtgatgacctttcaggcagcggacccgctcaacttccaatatgcgtaccgcctcgacactggcgaagccactctaacgaatgagccctcggaagactttgcgaacacgttcatgcagatgacacccttcactcgctggaggcttcgtctctctgcgtccgcctcagagaatgcagaattagcgtttccaacagctacagctcccgactccactaccgaggttgtcatcacgttccatgttacggcaattagacaagttgactggcggcaagaggaggag

SEQ ID NO: 45 - protein, 852 aa, Adiantum trapeziforme
MDYSTLYRDLNQISMPLDRVEFSEVMVIHRMYLRLSDLNVGELPGAERVKRLYVLADVVELATFAHPQLLNTRMPGSVTVIILCRLLQFPTDGSFAAWLELPFMELHTLIEQYRSEIKAADDAKWGTYVHAEEVQLSPLFNGWPYLVVEAQRCIITAAMHNTFNRPGWVRSITQFTTDQSGRVDTTLLARTEFGHIDLPLETDSPTAFSVSHRQSTNLPVEYTGIPVEVVTDPNILMGMQTSVHIAELVKACYPSPELVSAVGVHVNWLNEVLLRVVQKESQLQGTEAYNECLALLGRIQCVMKMGPFVSVVPQLQYRMYGSLIRQMAQVAQNYDQDFRQLKLFIAQNQILGSYLLQQNKAFADREVQMESFHSAVISQRRQELDDAIAKMDRLSLQMEEEDRAMEQARKEMEEGLKQFQNEQVARAVFAVLKSVAMIALAFVTAGATAPGAAASAAQAVNIAGQAAQALRRVVEILEGLEAVMEVVAAIKHLVDALDQVSQIVDAPPMPDMPSEADWSIFVNEIEAVAEGMPTEVSEVPAWKAKCKNVAALGREMCITAEQISQLQYDIWVQGLLRDIAQSHADRLAAIQPANLTNYLEMAIQMDMRTTRILIGLLNIMRIQNAALMYEYLLTPTQLTAWPLRMDTVANLLITHESAALSGLAQLGPPSDFTSRHVVKGIPVSLLLDGGDWEFEIPVQGGMSSFPSSWTRVRIRHLEMHFVQEASGGGEIIHQPATQTGTIYILLQGSTVFHDRRREEVMTFQAAVPLNYHYAYRLDTGEATLTNEPSEQFANTFMQMTPFTHWRLRLSASAAENKGLAFPTATAPDSTTEIAITFHVTAIRQIDWRQEEE

SEQ ID NO: 46 - DNA, 2556 bp, Adiantum trapeziforme
atggattacagcacgctttacagggatctgaaccagataagcatgcccctggatcgggtagagttctcagaggtgatggtaatccacaggatgtacttgaggttatctgatctgaatgtgggggagctccccggagccgagagggtgaagcggttgtatgtgttggcagacgtggtggagctcgcaacatttgcgcatccacagttgcttaatacgcggatgccaggatcggtgacggtgatcattctgtgtcgtcttcttcagtttccaactgatgggtcgttcgctgcttggctcgagctgccgttcatggagttgcacacactcatagaacaatacaggtcagagataaaagcagcagatgacgcgaaatggggaacgtatgtacacgcggaggaagtacagctcagcccgctgtttaatgggtggccttatctggttgttgaggcacagcgctgtattataaccgcggccatgcacaatacatttaaccgccctgggtgggttcgctccattactcaatttacaactgatcagtccggtcgggtagataccacactgctcgcacgaacagaattcggccatattgatctaccactcgaaacagattccccaacggcattcagtgtttcacaccgccaaagtacgaatttgcccgtagagtacaccggtattccagtggaggtggtgaccgatcctaacatcttgatgggcatgcaaaccagcgtgcacattgcggagctagtgaaggcatgttacccgtcaccagaattagtgagcgctgtaggggtgcacgtgaattggctcaacgaagtcttgctccgagttgtccagaaggaatctcagttgcaagggaccgaggcctacaacgagtgccttgcgcttttaggtcgcattcaatgtgtcatgaagatggggccgtttgtctcggtagtgccgcagctgcaatacagaatgtatggtagcctcatcagacaaatggcccaggtagcacagaactacgaccaagatttcaggcagctcaagttattcattgcccaaaaccaaatccttggcagctatttgctgcagcagaacaaggcctttgctgacagagaggtgcagatggagagctttcattcagcggtcatttctcaaagaaggcaggagttggacgacgccatcgctaagatggaccgactgagcttgcagatggaggaagaggacagagcaatggagcaagcccgaaaagaaatggaagaaggattgaagcagttccagaatgagcaagttgcaagggctgtgttcgctgttcttaaatctgtagctatgattgcgctcgcattcgtcacggctggtgcaacggctcctggggctgcagcatctgcagcgcaagctgtgaacatagccggtcaagcggcacaagctctgcgaagggtggtggaaattctagaggggctcgaggctgtgatggaggttgtggctgctataaagcaccttgtggatgctctggaccaggtaagtcagattgtggatgcaccacctatgccagacatgccctcggaggcggactggagtatttttgtgaatgagattgaagccgtggcagaggggatgccgacggaagtctcggaggttccggcgtggaaggccaagtgcaagaatgtggctgcactgggtagggagatgtgcatcacggcagaacagatttcccagctccagtatgacatctgggtgcaaggcttgttgcgggatatagctcaaagccacgcagaccggctggcagcgattcaacctgctaatcttaccaactatttggagatggcaatacagatggatatgcggactacgaggatactgatagggctcctcaacataatgcgcatccagaatgcggcacttatgtatgagtaccttctaacgcccacgcagctcactgcatggccgctgagaatggatactgtggccaacttgctcatcacgcacgagagtgctgcactgtcaggattagctcagttagggcccccatcggacttcacgagcaggcatgtagtgaaaggcatacctgtgagcttgcttctagacggtggggattgggaatttgagattcctgtgcaaggtggcatgtccagtttcccttccagctggactcgagtgcggattcggcacctggagatgcactttgtgcaggaggcgagcggtggcggcgagattatccaccagcctgccacccagacggggaccatttacatcctcctgcagggctccactgtcttccatgatcgcagaagggaggaggtgatgacctttcaggcagcggttccgctcaactaccattacgcgtaccgcctcgacactggagaagccactcttacgaacgagccctcggaacagtttgccaacacattcatgcagatgacaccgttcactcactggaggctacgtctgtctgcgtccgcagcggagaataaaggattagcctttcccacagctacagctcccgactccaccactgagattgccatcactttccatgttacggccattagacaaattgactggcggcaagaggaggag

SEQ ID NO: 47 - protein, 851 aa, Adiantum trapeziforme
MDYSTLYRDLNQISIGVDRVEFSEVMVIHRMYVRLSDLNVGELPGAGRVKRVYVFADVVELAPRATLRDQMHMPGSVTVIVLCRLLQFPIDGSQATTLRLPFMQLHARVIEQNVKSEITATDGMNWGIYIYGEKVERSPLLPSNAILAVWADRCTITSARHNHVNAPGRIISTFTLGSGVTGITSMHGEPSLDPWNGVSLDSASPTAFSALPRQSRNISFTSIPVEVVTDPSILLGMQTTVLIAELVKVCRPPSPDMMSAVAEHALWLNDVLLQVVQKESQMQGTAPYNECLALLGRIECVMKIGRFVSVVPQLQYRMYGNLIKQMAQVAQNYDQEFKQFKLFIIQNQIFGSYLLQQNKAFADRELQMESFHSAVISQRRQELNTAIAKMERMSLQMEEENRAMEQAQKEMEEGLREFQNRQVARAVFAVLKAVAMIALAFVTAGATAPGAAASAGQAVSIAGQAAQALRRVVEILEGLEAVMEVVAAVKDLVDSLEQVGHIVGAPEMPDMPSEADWSIFVNEIEAVAEGMPTEVSEVPAWKAKCKNMAALGREMSITAVQISELQYEIWVQGLMRDIARSHADRLAAIQPVDLTNHLEMATHMDMRTTSMLIGLLNMLRIQNAALMYEYLLTPTELTVWPLGMDTVANLLIAQENAALVGLIQLGPSSNFTSRHVVKGIPVSLLLDGEDWEFEIPVQAGMSSFPFNWTRVRIRHLEMQFAQEASGGDEIIHQPSTRSGIVYILLQGSTIFHDRRRDEVMTFQAADPLNFQYAYRLDTGEATLTNEPSEEFANTFMQMTPFTRWRLRLSASASENAELAFPTATAPDSTTEVVITFHVTAIRQVDWRQEEE

SEQ ID NO: 48 - DNA, 2553 bp, Adiantum trapeziforme
atggattacagcacgctttacagggacctgaaccagataagcatcggtgtggaccgggtagagttctcagaggtgatggtgatccacaggatgtatgtaaggttgtctgatctgaatgtgggggagctccccggagccgggagagtgaagcgggtgtacgtgtttgcggatgtggtggagcttgcaccgcgtgcgacgctgcgggatcagatgcatatgccaggatcggtgacagtgatcgtattgtgtcgtcttcttcaatttccaatcgatgggtcgcaagctacaactctccggctgcctttcatgcagttgcatgccagagtcatagagcaaaatgtaaagtcggagataacagcaacagatggcatgaattggggaatctacatatacggggagaaagtagagaggagcccgctccttcctagcaatgcaatccttgcagtttgggcagatcgctgtactataacctcagcccgtcacaatcatgttaacgcacctgggagaataatatcgactttcacacttgggtcgggagtaacgggtataacctctatgcacggggaacccagtttggacccttggaatggtgtttctctcgactcagcttcccctacggcatttagtgctttacctcgccaaagtaggaatatatccttcacaagtattccagtagaggtggtgactgatcctagcatcttgctgggcatgcagaccaccgtgctaattgcggagctagtcaaggtatgtcgcccaccatcacccgacatgatgagtgctgtagcggagcacgcgctttggctcaatgatgtcttacttcaagttgtccagaaagaatcgcagatgcaagggactgcgccctacaacgagtgccttgcacttttgggtcgcattgaatgtgtgatgaaaatcgggagatttgtctcagtagtgcctcagctgcaatacagaatgtatggtaacctcatcaaacaaatggcccaagtagcacaaaactacgaccaagaattcaagcaattcaagttattcatcatccaaaaccaaatctttggcagctatttgcttcagcagaacaaggcatttgctgacagggagctgcagatggagagctttcattcagcggtcatttctcaaagaaggcaggagttgaatactgccatcgcaaagatggagcgaatgagcttgcaaatggaggaagagaatagagcaatggagcaagctcaaaaggaaatggaagaaggattgagggagttccagaataggcaagttgcaagggccgtatttgccgttcttaaagccgtagctatgattgcgcttgcattcgtcacggctggtgcgacggctcctggagctgcggcgtccgcggggcaagctgtgagcatagcaggtcaggccgcacaagctctgcgaagggtggtggaaattctagaggggctggaggctgtgatggaggttgtggctgctgtgaaggaccttgtggattcattggaacaggtaggtcacattgtgggggcaccggagatgccggacatgccctcggaggcggactggtccatttttgtgaatgagattgaggccgtggcagaggggatgccaacggaagtctcggaggttccggcatggaaggccaagtgcaagaatatggctgcactgggtagggagatgagcatcacggcagtacagatttctgagctccagtatgagatctgggtgcaaggcttgatgcgggatatagctcgaagccatgcagacaggttggctgcgattcaacctgtggaccttaccaaccatttggagatggccacacacatggatatgcggactacaagtatgctgatagggctcctcaatatgctgcgcatccagaatgcggcactcatgtacgagtaccttctaacacccacggagctcacagtatggccactgggtatggataccgtggccaacttgctcattgcgcaggagaatgctgcactggtgggattaattcagctagggccctcgtcgaattttacgagcagacatgtggtgaaaggcatacctgtgagcttgctgctcgatggtgaggattgggagttcgagatccctgtgcaagctggcatgtccagcttccctttcaactggactcgggtcaggattcggcacctggagatgcaatttgcgcaggaggcgagtggtggtgacgagattatccaccagccttccacccggtcggggattgtttacatcctcctgcagggctccactatcttccatgaccgcagaagagatgaggtgatgacctttcaggcagcggacccgctcaacttccaatatgcgtaccgcctcgacactggcgaagccactctaacgaatgagccctcggaagagtttgcgaacacgttcatgcagatgacacccttcactcgctggaggcttcgtctctctgcgtccgcctcagagaatgcagaattagcgtttccaacagctacagctcccgactccactaccgaggttgtcatcacgttccatgttacggcaatcagacaagttgactggcggcaagaggaggag

SEQ ID NO: 49 - protein, 851 aa, Adiantum trapeziforme
MDYSTLYRDLNQISIGVDRVEFSEVMVIHRMYVRLSDLNVGELPGAGRVKRVYVFADVVELAPRETLRDQMHMPGSVTVIILCRLLQFPIDGSQATTLRLPFMQLHARVIEQNVKSEITATDGMNWGIYIYGEKVERSPLLPSNAILAVWADRCTITSARHNHVNAPGRIISTFTLGSGVTGITSMHGEPSLDPWNGVSLDSASPTAFSALPRQSRNISFTSIPVEVVTDPSILLGMQTTVLIAELVKVCRPPSPDMMSAVAEHALWLNDVLLQVVQKESQMQGTAPYNECLALLGRIECVMKIGRFVSVVPQLQYRMYGNLIKQMAQVAQNYDQEFKQFKLFIIQNQIFGSYLLQQNKAFADRELQMESFHSAVISQRRQELNTAIAKMERMSLQMEEENRAMEQAQKEMEEGLREFQNRQVARAVFAVLKAVAMIALAFVTAGATAPGAAASAGQAVSIAGQAAQALRRVVEILEGLEAVMEVVAAVKDLVDSLEQVGHIVGAPEMPDMPSEADWSIFVNEIEAVAEGMPTEVSEVPAWKAKCKNMAALGREMSITAVQISELQYEIWVQGLMRDIARSHADRLAAIQPVDLTNHLEMATHMDMRTTSMLIGLLNMLRIQNAALMYEYLLTPTELTVWPLGMDTVANLLIAQENAALVGLIQLGPSSNFTSRHVVKGIPVSLLLDGEDWEFEIPVQAGMSSFPFNWTRVRIRHLEMQFAQEASGGDEIIHQPSTRSGIVYILLQGSTIFHDRRRDEVMTFQAADPLNFQYAYRLDTGEATLTNEPSEEFANTFMQMTPFTRWRLRLSASASENAELAFPTATAPDSTTEVVITFHVTAIRQVDWRQEEE

SEQ ID NO: 50 - DNA, 2553 bp, Adiantum trapeziforme
atggattacagcacgctttacagggacctgaaccagataagcatcggtgtggaccgggtagagttctcagaggtgatggtgatccacaggatgtatgtaaggttgtctgatctgaatgtgggggagctccccggagccgggagagtgaagcgggtgtacgtgtttgcggatgtggtggagcttgcaccgcgcgagacgctgcgggaccagatgcatatgccaggatcggtgacagtgatcatattgtgtcggcttcttcaatttccaatcgatgggtcgcaagctacaactctccggctgcctttcatgcagttgcatgccagagtcatagagcaaaatgtaaagtcggagataacagcaacagatggcatgaattggggaatctacatatacggggagaaagtagagaggagcccgctccttcctagcaatgcaatccttgcagtttgggcagatcgctgtactataacctcagcccgtcacaatcatgttaacgcacctgggagaataatatcgactttcacacttgggtcgggagtaacgggtataacctctatgcacggggaacccagtttggacccttggaatggtgtttctctcgactcagcttcccctacggcatttagtgctttacctcgccaaagtaggaatatatccttcacaagtattccagtagaggtggtgactgatcctagcatcttgctgggcatgcagaccaccgtgctaattgcggagctagtcaaggtatgtcgcccaccatcacccgacatgatgagtgctgtagcggagcacgcgctttggctcaatgatgtcttacttcaagttgtccagaaagaatcgcagatgcaagggactgcgccctacaacgagtgccttgcacttttgggtcgcattgaatgtgtgatgaaaatcgggagatttgtctcagtagtgcctcagctgcaatacagaatgtatggtaacctcatcaaacaaatggcccaagtagcacaaaactacgaccaagaattcaagcaattcaagttattcatcatccaaaaccaaatctttggcagctatttgcttcagcagaacaaggcatttgctgacagggagctgcagatggagagctttcattcagcggtcatttctcaaagaaggcaggagttgaatactgccatcgcaaagatggagcgaatgagcttgcaaatggaggaagagaatagagcaatggagcaagctcaaaaggaaatggaagaaggattgagggagttccagaataggcaagttgcaagggccgtatttgccgttcttaaagccgtagctatgattgcgcttgcattcgtcacggctggtgcgacggctcctggagctgcggcgtccgcggggcaagctgtgagcatagcaggtcaggccgcacaagctctgcgaagggtggtggaaattctagaggggctggaggctgtgatggaggttgtggctgctgtgaaggaccttgtggattcattggaacaggtaggtcacattgtgggggcaccggagatgccggacatgccctcggaggcggactggtccatttttgtgaatgagattgaggccgtggcagaggggatgccaacggaagtctcggaggttccggcatggaaggccaagtgcaagaatatggctgcactgggtagggagatgagcatcacggcagtacagatttctgagctccagtatgagatctgggtgcaaggcttgatgcgggatatagctcgaagccatgcagacaggttggctgcgattcaacctgtggaccttaccaaccatttggagatggccacacacatggatatgcggactacaagtatgctgatagggctcctcaatatgctgcgcatccagaatgcggcactcatgtacgagtaccttctaacacccacggagctcacagtatggccactgggtatggataccgtggccaacttgctcattgcgcaggagaatgctgcactggtgggattaattcagctagggccctcgtcgaattttacgagcagacatgtggtgaaaggcatacctgtgagcttgctgctcgatggtgaggattgggagttcgagatccctgtgcaagctggcatgtccagcttccctttcaactggactcgggtcaggattcggcacctggagatgcaatttgcgcaggaggcgagtggtggtgacgagattatccaccagccttccacccggtcggggattgtttacatcctcctgcagggctccactatcttccatgaccgcagaagagatgaggtgatgacctttcaggcagcggacccgctcaacttccaatatgcgtaccgcctcgacactggcgaagccactctaacgaatgagccctcggaagagtttgcgaacacgttcatgcagatgacacccttcactcgctggaggcttcgtctctctgcgtccgcctcagagaatgcagaattagcgtttccaacagctacagctcccgactccactaccgaggttgtcatcacgttccatgttacggcaatcagacaagttgactggcggcaagaggaggag

SEQ ID NO: 51 - protein, 854 aa, Adiantum peruvianum
MDYSTLYRDLNQISIGVDRVEFSEVMVIHRMYVRLSDLNVGELPGAGRVKRVYVFADVVELAPRATLRDQMHMPGSVTVIVLCRLLQFPIDGSQATTLRLPFMQLHARVIEQNVKSEITATDGMNWGIYIYGEKVERSPLLPSNAILAVWADRCTITSARHNHVNAPGRIISTFTLGSGVTGITSMHGEPSLDPWNGVSLDSASPTAFSALPRQSRNISFTSIPVEVVTDPSILLGMQTTVLIAELVKVCRPPSPDMMSAVAEHALWLNDVLLQVVQKESQMQGTAPYNECLALLGRIECVMKIGRFVSVVPQLQYRMYGNLIKQMAQVAQNYDQEFKQFKLFIIQNQIFGSYLLQQNKAFADRELQMESFHSAVISQRRQELNTAIAKMERMSLQMEEENRAMEQAQKEMEEGLREFQNRQVARAVFAVLKAVAMIALAFVTAGATAPGAAASAGQAVSIAGQAAQALRRVVEILEGLEAVMEVVAAVKDLVDSLEQVGHIVGAPEMPDMPSEADWSIFVNEIEAVAEGMPTEVSEVPAWKAKCKNMAALGREMSITAVQISELQYEIWVQGLMRDIARSHADRLAAIQPVDLTNHLEMATHMDMRTTSMLIGLLNMLRIQNAALMYEYLLTPTELTVWPLGMDTVANLLIAQENAALVGLIQLGPSSNFTSRHVVKGIPVSLLLDGEDWEFEIPVQAGMSSFPFNWTRVRIRHLEMQFAQEASGGDEIIHQPSTRSGIVYILLQGSTIFHDRRRDEVMTFQAADPLNFQYAYRLDTGEATLTNEPSEEFANTFMQMTPFTRWRLRLSASASENAELAFPTATAPDSTTEVVITFHVTAIRQVDWRQEEKEEE

SEQ ID NO: 52 - DNA, 2562 bp, Adiantum peruvianum
atggattacagcacgctttacagggacctgaaccagataagcatcggtgtggaccgggtagagttctcagaggtgatggtgatccacaggatgtatgtaaggttgtctgatctgaatgtgggggagctccccggagccgggagagtgaagcgggtgtacgtgtttgcggatgtggtggagcttgcaccgcgtgcgacgctgcgggatcagatgcatatgccaggatcggtgacagtgatcgtattgtgtcgtcttcttcaatttccaatcgatgggtcgcaagctacaactctccggctgcctttcatgcagttgcatgccagagtcatagagcaaaatgtaaagtcggagataacagcaacagatggcatgaattggggaatctacatatacggggagaaagtagagaggagcccgctccttcctagcaatgcaatccttgcagtttgggcagatcgctgtactataacctcagcccgtcacaatcatgttaacgcacctgggagaataatatcgactttcacacttgggtcgggagtaacgggtataacctctatgcacggggaacccagtttggacccttggaatggtgtttctctcgactcagcttcccctacggcatttagtgctttacctcgccaaagtaggaatatatccttcacaagtattccagtagaggtggtgactgatcctagcatcttgctgggcatgcagaccaccgtgctaattgcggagctagtcaaggtatgtcgcccaccatcacccgacatgatgagtgctgtagcggagcacgcgctttggctcaatgatgtcttacttcaagttgtccagaaagaatcgcagatgcaagggactgcgccctacaacgagtgccttgcacttttgggtcgcattgaatgtgtgatgaaaatcgggagatttgtctcagtagtgcctcagctgcaatacagaatgtatggtaacctcatcaaacaaatggcccaagtagcacaaaactacgaccaagaattcaagcaattcaagttattcatcatccaaaaccaaatctttggcagctatttgcttcagcagaacaaggcatttgctgacagggagctgcagatggagagctttcattcagcggtcatttctcaaagaaggcaggagttgaatactgccatcgcaaagatggagcgaatgagcttgcaaatggaggaagagaatagagcaatggagcaagctcaaaaggaaatggaagaaggattgagggagttccagaataggcaagttgcaagggccgtatttgccgttcttaaagccgtagctatgattgcgcttgcattcgtcacggctggtgcgacggctcctggagctgcggcgtccgcggggcaagctgtgagcatagcaggtcaggccgcacaagctctgcgaagggtggtggaaattctagaggggctggaggctgtgatggaggttgtggctgctgtgaaggaccttgtggattcattggaacaggtaggtcacattgtgggggcaccggagatgccggacatgccctcggaggcggactggtccatttttgtgaatgagattgaggccgtggcagaggggatgccaacggaagtctcggaggttccggcatggaaggccaagtgcaagaatatggctgcactgggtagggagatgagcatcacggcagtacagatttctgagctccagtatgagatctgggtgcaaggcttgatgcgggatatagctcgaagccatgcagacaggttggctgcgattcaacctgtggaccttaccaaccatttggagatggccacacacatggatatgcggactacaagtatgctgatagggctcctcaatatgctgcgcatccagaatgcggcactcatgtacgagtaccttctaacacccacggagctcacagtatggccactgggtatggataccgtggccaacttgctcattgcgcaggagaatgctgcactggtgggattaattcagctagggccctcgtcgaattttacgagcagacatgtggtgaaaggcatacctgtgagcttgctgctcgatggtgaggattgggagttcgagatccctgtgcaagctggcatgtccagcttccctttcaactggactcgggtcaggattcggcacctggagatgcaatttgcgcaggaggcgagtggtggtgacgagattatccaccagccttccacccggtcggggattgtttacatcctcctgcagggctccactatcttccatgaccgcagaagagatgaggtgatgacctttcaggcagcggacccgctcaacttccaatatgcgtaccgcctcgacactggcgaagccactctaacgaatgagccctcggaagagtttgcgaacacgttcatgcagatgacacccttcactcgctggaggcttcgtctctctgcgtccgcctcagagaatgcagaattagcgtttccaacagctacagctcccgactccactaccgaggttgtcatcacgttccatgttacggcaatcagacaagttgactggcggcaggaggagaaagaggaggag

SEQ ID NO: 53 - protein, 852 aa, Lygodium flexuosum
MASVLDYSTLYRDLNQISMAVDQVEFSEVMVIHRMYVNLADLDVAELVGAETVKRVYVFADVVELAPGKRTQLPGSVTVIILCRLLQFPTGGSRAATLQLPFMKVHATLIERFRSEIAAADGMNWGTYIHGEEVQVSPLYPNNSILGVWADRSIITSAFHNVFDEPGRVISSTSITRAQSAPNNTTMSAEPGWLSGNRFLLYTVSRSAFSVLPSQSTNVSFTSIPVEVVTDPNILLGMQTTVHIAELVKAGHPSPDIVSAVAEHAIWLSKVLLQVVQNESHLQGTESYNECLALLGRVQSVIKMGRFGLVVPQLQYRMYGSLIKQMAQVAQNYDQDFKRFRLFILQNQILGSYLLEQNKAFADRELQMESFHSAVISQRKGELDTAFAKMDRLSLQMEEENGAMEQAQKEMDEGLRQFQNRQVARALFAVLRAVAQIGLAFVTAGATAPGAVASAGQAVSIAGQAAQGLRRVVEILEQLEAVMEVVAAVKDLVNSLEQVGQLVQAPVMPDMPSEADWSIFVNEVEAVAEGMPTEVSEVPAWKAKCKNVAALGREMSITAVQISELQYDIWVQGMMRDIAQSQADRLAAIQPADLTNFLEMATQMDMRTTRMLIGLLNMLRIQNAALMYEYLLTPTELTAWPLGMDTVGNLLIAQENAALLGLTQLGPSSDFTSRHVVKGIPVSLLLDGEDWEFEIPVQGGMSSFPSSWTRVRIRHLEMHFVQESMNGGGEIIHQPATQTGTVYILLQGSTIFHDRRRDEVMTFQAAAPLNYQYAYRLDTGETTLTNQPSEHFANTFMQMTPFTRWRLRLSASAPENAGLAFPTATALDSTTQIVITFHVTAIRQIDWRHEEE

SEQ ID NO: 54 - DNA, 2556 bp, Lygodium flexuosum
atggccagtgtactggattacagcacgctttacagggatctgaaccagataagcatggctgtggatcaggtagagttctcagaggtgatggtgatccacaggatgtatgtgaatttagctgacctggatgtggcggagctcgtgggagctgagacagtgaagcgggtgtatgtgtttgcggatgtggtggagcttgcaccggggaaacggacgcaattgccaggatcggtgacggtgatcatattgtgtcgtcttcttcaatttccaactggtgggtcgcgagcagcaactctccagctgcctttcatgaaggtccatgctacactcatagagcgatttaggtcagagatagcagcagcagatgggatgaactggggaacgtacatacacggggaggaagtacaggtcagcccgctgtatcctaacaattcaatacttggagtttgggcagatcgctctattataacctcagcctttcacaatgtgttcgacgaacctgggagagtaatttccagtactagtattacaagggcacagtcagcacccaacaacacgactatgtcagcagaacccggctggctctctggcaatcgttttctactttacacggtttcccggtcggcattcagtgttttacctagccaaagtacgaatgtatccttcacaagtattccggtagaggtggtgactgatccgaacatcttgctgggcatgcagacaacagtgcacattgcggagctagtcaaggcaggtcacccgtcacccgacattgtgagcgcggtagcggagcacgcgatttggctcagcaaagtcttgctccaagttgtgcagaacgaatctcacttgcaagggaccgagtcctacaacgagtgcctggcacttttgggccgtgttcaatctgtgatcaagatggggagatttggcttagtagtgccccagctgcaatacagaatgtacggtagcctcatcaaacaaatggcccaagtagcacagaactacgaccaagatttcaagcgattccggttattcattcttcaaaatcaaatccttggcagctatttgctggagcagaacaaggcatttgctgacagggagctgcagatggagagcttccattcagccgtgatttctcaaagaaaaggcgagctggacactgccttcgcaaagatggaccgactgagcttgcaaatggaggaagagaatggcgcaatggagcaagcccaaaaggaaatggacgaaggattaaggcagttccagaataggcaagttgcaagggccctctttgccgttcttagagctgtagctcagattgggcttgcattcgtcacggctggtgcaacggctcctggagctgtggcgtccgcggggcaagccgtgagcatagcaggtcaggccgcgcaaggtctgcgaagggtggtggaaatcctagagcagctggaagctgtgatggaggttgtggctgctgtgaaggaccttgtgaattcattggaacaggtaggtcagttggtgcaggcaccggtgatgccggacatgccctcggaagcggactggtccatttttgtgaatgaggtcgaggccgtggcagaggggatgccgacggaagtctcggaggttccagcgtggaaggccaagtgcaagaatgtggctgcactgggtcgggagatgagcatcaccgcagtacaaatttctgagctccagtatgacatctgggtgcaaggcatgatgcgggatattgctcaaagccaggcagacaggctggcggcgattcaacccgcggaccttaccaactttttggagatggcaacacagatggatatgcggactacaaggatgctgatagggctcctcaacatgctccgcatccagaatgcggcactcatgtacgagtaccttcttacgcccacggagctcacagcatggccgctgggtatggataccgtgggcaacttgctcattgcgcaggagaatgctgcactattaggattaactcagctaggaccctcatccgatttcacgagcaggcatgtggtgaaaggcatacctgtgagcttgctactcgatggtgaggattgggagttcgagatccctgtgcaaggtggcatgtccagcttcccttcaagctggactcgcgtccggattcggcacttggagatgcactttgtgcaagagtcgatgaacggtggcggcgagattattcaccagcctgccacccagactgggaccgtttacatcctcctgcagggctccactatcttccatgaccgcagaagagacgaggtgatgacctttcaggcagcggctccgctcaactaccagtacgcgtaccgcctcgacactggtgaaaccactcttacgaaccagccctcggaacactttgccaacacgttcatgcagatgacacccttcactcgctggaggcttcgtctctctgcgtccgccccagagaatgcaggattagcctttcccacagctacagctctcgactccactacccagattgtcatcactttccatgttacggccattagacaaattgactggcggcacgaggaggag

SEQ ID NO: 55 - protein, 852 aa, Adiantum peruvianum
MDYSTLYRDLNQISMPLDRVEFSEVMVIHRMYLRLSDLNVGELPGAERVKRLYVFADVVELATFAYPQLLHTRMPGSVTVIILCRLLQFPTDGSFAAWLELPFMELHTLIEQYRSEIKAADDAKWGTYVHAEEVQLSPLFNGWPYLVVEAQRCIITAAMHNTFNRPGWVRSVTQFTTDQSGRVDTTLLARTEFGHIYLPLETDSPTAFSVSHRQSTNLPVEYTGIPVEVVTDPNILMGMQTSVHIAELVKACYPSPELVSAVGVHVNWLNEVLLRVVQKESQLQGTEAYNECLALLGRIQCVMKMGPFVSVVPQLQYRMYGSLIRQMAQVAQNYDQDFRQLKLFIAQNQILGSYLLQQNKAFADREVQMESFHSAVISQRRQELDDALAKMDRLSLQMEEEDRAMEQARKEMEEGLKQFQNEQVARAVFAVLKSVAMIALAFVTAGATAPGAAASAAQAVNIAGQAAQALRRVVEILEGLEAVMEVVAAIKHLVDALDQVSQIVDAPPMPDMPSEADWSIFVNEIEAVAEGMPTEVSEVPAWKAKCKNVAALGREMCITAEQISQLQYDIWVQGLLRDIAQTHADRLAAIQPANLTNYLEMATQMDMRTTRILIGLLNIMRIQNAALMYEYLLTPTQLTAWPLRMDTVANLLITQESAALSGLAQLGPPSDFTSRHVVKGIPVSLLLDGGDWEFEIPVQGGMSSFPSSWTRVRIRHLEMHFVQEASGGGEIIHQPATQTGTVYILLQGSTVFHDRRREEVMTFQAAVPLNYHYAYRLDTGEATLTNEPSEQFANTFMQMTPFTHWRLRLSASAAENEGLAFPTATAPDSTTEIAITFHVMAIRQIDWRQEEE

SEQ ID NO: 56 - DNA, 2556 bp, Adiantum peruvianum
atggattacagcactctttacagggatctgaaccagataagcatgcccctggatcgggtagagttctcagaggtgatggtaatccacaggatgtacttgaggttatctgatctgaatgtgggggagctccccggagccgagagggtgaagcggttgtatgtgtttgcagacgtggtggagctcgcgacatttgcgtatccacagttgcttcatacgcggatgccaggatcggtgacggtgatcattctgtgtcgtcttcttcagtttccaactgatgggtcgttcgctgcttggctcgagctgccgttcatggagttgcacacactcatagaacaatacaggtcagagataaaagcagcagatgacgcgaaatggggaacgtatgtacacgcggaggaagtacagctcagcccgctgtttaatgggtggccttatctggttgttgaggcacagcgctgtattataaccgcggccatgcacaatacatttaaccgccctgggtgggttcgctccgttactcaatttacaactgatcagtccggtcgggtagataccacactgctcgcacgaacagaattcggccatatttatctaccactcgagacagattccccaacggcattcagtgtttcacaccgccaaagtacgaatttgcccgtagagtacaccggtattccagtagaggtggtgaccgatcctaacatcttgatgggcatgcaaaccagcgtgcacattgcggagctagtgaaggcatgttacccgtcaccagaattagtgagcgctgtaggggtgcacgtgaattggctcaacgaagtcttgctccgagttgtccagaaggaatctcagttgcaagggaccgaggcctacaacgagtgccttgcgcttttgggtcgcattcaatgtgtcatgaagatggggccgtttgtctcggtagtgccgcagctgcaatacagaatgtatggtagcctcatcagacaaatggcccaggtagcacagaactacgaccaagatttcaggcagctcaagttattcattgcccaaaaccaaatccttggcagctatttgctgcagcagaacaaggcatttgctgacagagaggtgcagatggagagctttcattcagcggtcatttctcaaagaaggcaggagttggacgacgccctcgctaagatggaccgactgagcttgcagatggaggaagaggacagagcaatggagcaagcccgaaaagaaatggaagaaggattgaagcagttccagaatgagcaagttgcaagggctgtgttcgctgttcttaaatctgtagctatgattgcgctcgcattcgtcacggctggtgcaacggctcctggggctgcagcatccgcagcgcaagctgtgaacatagccggtcaagcggcacaagctctgcgaagggtggtggaaattctagaggggctcgaggctgtgatggaggttgtggctgctataaagcaccttgtggatgctctggaccaggtaagtcagattgtggatgcaccacctatgccagacatgccctcggaggcagactggagtatttttgtgaatgagattgaagccgtggcagaggggatgccgacggaagtctcggaggttccggcgtggaaggccaagtgcaagaatgtggctgcactgggtagggagatgtgcatcacggcagaacagatttcccagctccagtatgacatctgggtgcaaggcttgttgcgggatatagctcaaacccacgcagaccggctggcagcgattcaacctgctaatcttaccaactatttggagatggcaacacagatggatatgcggactacgaggatattgatagggctcctcaacataatgcgcatccagaatgcggcacttatgtatgagtaccttctaacgcccacgcagctcactgcatggccgctgagaatggatactgtggccaacttgctcatcacgcaggagagtgctgcactgtcaggattagctcagttagggcccccatcggacttcacgagcaggcatgtggtgaaaggcatacctgtgagcttgcttctagacggtggggattgggaatttgagattcctgtgcaaggtggcatgtccagtttcccttccagctggactcgagtgcggattcggcacctggagatgcactttgtgcaggaggcgagcggtggcggcgagattatccaccagcctgccacccagacggggaccgtttacatcctcctgcagggctccactgtcttccatgatcgcagaagggaggaggtgatgacctttcaggcagcggttccgctcaactaccattacgcgtaccgcctcgacactggagaagccactcttacgaacgagccctcggaacagtttgccaacacattcatgcagatgacaccgttcactcactggaggctacgtctgtctgcgtccgcagcggagaatgaaggattagcctttcccacagctacagctcccgactccaccactgagattgccatcactttccatgttatggccattagacaaatcgactggcggcaagaggaggag

SEQ ID NO: 57 - protein, 782 aa, Adiantum peruvianum
MDYSTLYRDLNQISIGVDRVEFSEVMVIHRMYVRLSDLNVGELPGAGRVKRVYVFADVVELAPRATLRDQMHMPGSVTVIVLCRLLQFPIDGSQATTLRLPFMQLHARVIEQNVKSEITATDGMNWGIYIYGEKVERSPLLPSNAILAVWADRCTITSARHNHVNAPGRIISTFTLGSGVTGITSMHGEPSLDPWNGVSLDSASPTAFSALPRQSRNISFTSIPVEVVTDPSILLGMQTTVLIAELVKVCRPPSPDMMSAVAEHALWLNDVLLQVVQKESQMQGTAPYNECLALLGRIECVMKIGRFVSVVPQLQYRMYGNLIKQMAQVAQNYDQEFKQFKLFIIQNQIFGSYLLQQNKAFADRELQMESFHSAVISQRRQELNTAIAKMERMSLQMEEENRAMEQAQKEMEEGLREFQNRQVARAVFAVLKAVAMIALAFVTAGATAPGAAASAGQAVSIAGQAAQALRRVVEILEGLEAVMEVVAAVKDLVDSLEQVGHIVGAPEMPDMPSEADWSIFVNEIEAVAEGMPTEVSEVPAWKAKCKNMAALGREMSITAVQISELQYEIWVQGLMRDIARSHADRLAAIQPVDLTNHLEMATHMDMRTTSMLIGLLNMLRIQNAALMYEYLLTPTELTVWPLGMDTVANLLIAQENAALVGLIQLGPSSNFTSRHVVKGIPVSLLLDGEDWEFEIPVQAGMSSFPFNWTRVRIRHLEMQFAQEASGGDEIIHQPSTRSGIVYILLQGSTIFHDRRRDEVMTFQAADPLNFQMRTASTLAKPL

SEQ ID NO: 58 - DNA, 2346 bp, Adiantum peruvianum
atggattacagcacgctttacagggacctgaaccagataagcatcggtgtggaccgggtagagttctcagaggtgatggtgatccacaggatgtatgtaaggttgtctgatctgaatgtgggggagctccccggagccgggagagtgaagcgggtgtacgtgtttgcggatgtggtggagcttgcaccgcgtgcgacgctgcgggatcagatgcatatgccaggatcggtgacagtgatcgtattgtgtcgtcttcttcaatttccaatcgatgggtcgcaagctacaactctccggctgcctttcatgcagttgcatgccagagtcatagagcaaaatgtaaagtcggagataacagcaacagatggcatgaattggggaatctacatatacggggagaaagtagagaggagcccgctccttcctagcaatgcaatccttgcagtttgggcagatcgctgtactataacctcagcccgtcacaatcatgttaacgcacctgggagaataatatcgactttcacacttgggtcgggagtaacgggtataacctctatgcacggggaacccagtttggacccttggaatggtgtttctctcgactcagcttcccctacggcatttagtgctttacctcgccaaagtaggaatatatccttcacaagtattccagtagaggtggtgactgatcctagcatcttgctgggcatgcagaccaccgtgctaattgcggagctagtcaaggtatgtcgcccaccatcacccgacatgatgagtgctgtagcggagcacgcgctttggctcaatgatgtcttacttcaagttgtccagaaagaatcgcagatgcaagggactgcgccctacaacgagtgccttgcacttttgggtcgcattgaatgtgtgatgaaaatcgggagatttgtctcagtagtgcctcagctgcaatacagaatgtatggtaacctcatcaaacaaatggcccaagtagcacaaaactacgaccaagaattcaagcaattcaagttattcatcatccaaaaccaaatctttggcagctatttgcttcagcagaacaaggcatttgctgacagggagctgcagatggagagctttcattcagcggtcatttctcaaagaaggcaggagttgaatactgccatcgcaaagatggagcgaatgagcttgcaaatggaggaagagaatagagcaatggagcaagctcaaaaggaaatggaagaaggattgagggagttccagaataggcaagttgcaagggccgtatttgccgttcttaaagccgtagctatgattgcgcttgcattcgtcacggctggtgcgacggctcctggagctgcggcgtccgcggggcaagctgtgagcatagcaggtcaggccgcacaagctctgcgaagggtggtggaaattctagaggggctggaggctgtgatggaggttgtggctgctgtgaaggaccttgtggattcattggaacaggtaggtcacattgtgggggcaccggagatgccggacatgccctcggaggcggactggtccatttttgtgaatgagattgaggccgtggcagaggggatgccaacggaagtctcggaggttccggcatggaaggccaagtgcaagaatatggctgcactgggtagggagatgagcatcacggcagtacagatttctgagctccagtatgagatctgggtgcaaggcttgatgcgggatatagctcgaagccatgcagacaggttggctgcgattcaacctgtggaccttaccaaccatttggagatggccacacacatggatatgcggactacaagtatgctgatagggctcctcaatatgctgcgcatccagaatgcggcactcatgtacgagtaccttctaacacccacggagctcacagtatggccactgggtatggataccgtggccaacttgctcattgcgcaggagaatgctgcactggtgggattaattcagctagggccctcgtcgaattttacgagcagacatgtggtgaaaggcatacctgtgagcttgctgctcgatggtgaggattgggagttcgagatccctgtgcaagctggcatgtccagcttccctttcaactggactcgggtcaggattcggcacctggagatgcaatttgcgcaggaggcgagtggtggtgacgagattatccaccagccttccacccggtcggggattgtttacatcctcctgcagggctccactatcttccatgaccgcagaagagatgaggtgatgacctttcaggcagcggacccgctcaacttccaaatgcgtaccgcctcgacactggcgaagccactc

SEQ ID NO: 59 - protein, 623 aa, Adiantum trapeziforme
MDYSTLYRDLNQISIGVDRVEFSPDMMSAVAEHALWLNDVLLQVVQKESQMQGTAPYNECLALLGRIECVMKIGRFVSVVPQLQYRMYGNLIKQMAQVAQNYDQEFKQFKLFIIQNQIFGSYLLQQNKAFADRELQMESFHSAVISQRRQELNTAIAKMERMSLQMEEENRAMEQAQKEMEEGLREFQNRQVARAVFAVLKAVAMIALAFVTAGATAPGAAASAGQAVSIAGQAAQALRRVVEILEGLEAVMEVVAAVKDLVDSLEQVGHIVGAPEMPDMPSEADWSIFVNEIEAVAEGMPTEVSEVPAWKAKCKNMAALGREMSITAVQISELQYEIWVQGLMRDIARSHADRLAAIQPVDLTNHLEMATHMDMRTTSMLIGLLNMLRIQNAALMYEYLLTPTELTVWPLGMDTVANLLIAQENAALVGLIQLGPSSNFTSRHVVKGIPVSLLLDGEDWEFEIPVQAGMSSFPFNWTRVRIRHLEMQFAQEASGGDEIIHQPSTRSGIVYILLQGSTIFHDRRRDEVMTFQAADPLNFQYAYRLDTGEATLTNEPSEEFANTFMQMTPFTRWRLRLSASASENAELAFPTATAPDSTTEVVITFHVTAIRQVDWRQEEKEEE

SEQ ID NO: 60 - DNA, 1869 bp, Adiantum trapeziforme
atggattacagcacgctttacagggacctgaaccagataagcatcggtgtggaccgggtagagttctcacccgacatgatgagtgctgtagcggagcacgcgctttggctcaatgatgtcttacttcaagttgtccagaaagaatcgcagatgcaagggactgcgccctacaacgagtgccttgcacttttgggtcgcattgaatgtgtgatgaaaatcgggagatttgtctcagtagtgcctcagctgcaatacagaatgtatggtaacctcatcaaacaaatggcccaagtagcacaaaactacgaccaagaattcaagcaattcaagttattcatcatccaaaaccaaatctttggcagctatttgcttcagcagaacaaggcatttgctgacagggagctgcagatggagagctttcattcagcggtcatttctcaaagaaggcaggagttgaatactgccatcgcaaagatggagcgaatgagcttgcaaatggaggaagagaatagagcaatggagcaagctcaaaaggaaatggaagaaggattgagggagttccagaataggcaagttgcaagggccgtatttgccgttcttaaagccgtagctatgattgcgcttgcattcgtcacggctggtgcgacggctcctggagctgcggcgtccgcggggcaagctgtgagcatagcaggtcaggccgcacaagctctgcgaagggtggtggaaattctagaggggctggaggctgtgatggaggttgtggctgctgtgaaggaccttgtggattcattggaacaggtaggtcacattgtgggggcaccggagatgccggacatgccctcggaggcggactggtccatttttgtgaatgagattgaggccgtggcagaggggatgccaacggaagtctcggaggttccggcatggaaggccaagtgcaagaatatggctgcactgggtagagagatgagcatcacggcagtacagatttctgagctccagtatgagatctgggtgcaaggcttgatgcgggatatagctcgaagccatgcagacaggttggctgcgattcaacctgtggaccttaccaaccatttggagatggccacacacatggatatgcggactacaagtatgctgatagggctcctcaatatgctgcgcatccagaatgcggcactcatgtacgagtaccttctaacacccacggagctcacagtatggccactgggtatggataccgtggccaacttgctcattgcgcaggagaatgctgcactggtgggattaattcagctagggccctcgtcgaattttacgagcagacatgtggtgaaaggcatacctgtgagcttgctgctcgatggtgaggattgggagttcgagatccctgtgcaagctggcatgtccagcttccctttcaactggactcgggtcaggattcggcacctggagatgcaatttgcgcaggaggcgagtggtggtgacgagattatccaccagccttccacccggtcggggattgtttacatcctcctgcagggctccactatcttccatgaccgcagaagagatgaggtgatgacctttcaggcagcggacccgctcaacttccaatatgcgtaccgcctcgacactggcgaagccactctaacgaatgagccctcggaagagtttgcgaacacgttcatgcagatgacacccttcactcgctggaggcttcgtctctctgcgtccgcctcagagaatgcagaattagcgtttccaacagctacagctcccgactccactaccgaggttgtcatcacgttccatgttacggcaatcagacaagttgactggcggcaggaggagaaagaggaggag

SEQ ID NO: 61 - protein, 691 aa, Adiantum trapeziforme
MDYSTLYRDLNQISIGVDRVEFSEVMVIHRMYVRLSDLNVGELPGAGRVKRVYVFADVVELAPRATLRDQMHMPGSVTVIVLCRLLQFPIDGSQATTLRLPFMQLHARVIEQNVKSEITATDGMNWGIYIYGEKVERSPLLPSNAILAVWADRCTITSARHNHVNAPGRIISTFTLGSGVTGITSMHGEPSLDPWNGVSLDSASPTAFSALPRQSRNISFTSIPVEVVTDPSILLGMQTTVLIAELVKVCRPPSPDMMSAVAEHALWLNDVLLQVVQKESQMQGTAPYNECLALLGRIECVMKIGRFVSVVPQLQYRMYGNLIKQMAQVAQNYDQEFKQFKLFIIQNQIFGSYLLQQNKAFADRELQMESFHSAVISQRRQELNTAIAKMERMSLQMEEENRAMEQAQKEMEEGLREFQNRQVARAVFAVLKAVAMIALAFVTAGATAPGAAASAGQAVSIALMYEYLLTPTELTVWPLGMDTVANLLIAQENAALVGLIQLGPSSNFTSRHVVKGIPVSLLLDGEDWEFEIPVQAGMSSFPFNWTRVRIRHLEMQFAQEASGGDEIIHQPSTRSGIVYILLQGSTIFHDRRRDEVMTFQAADPLNFQYAYRLDTGEATLTNEPSEEFANTFMQMTPFTRWRLRLSASASENAELAFPTATAPDSTTEVVITFHVTAIRQVDWRQEEKEEE

SEQ ID NO: 62 - DNA, 2073 bp, Adiantum trapeziforme
atggattacagcacgctttacagggacctgaaccagataagcatcggtgtggaccgggtagagttctcagaggtgatggtgatccacaggatgtatgtaaggttgtctgatctgaatgtgggggagctccccggagccgggagagtgaagcgggtgtacgtgtttgcggatgtggtggagcttgcaccgcgtgcgacgctgcgggatcagatgcatatgccaggatcggtgacagtgatcgtattgtgtcgtcttcttcaatttccaatcgatgggtcgcaagctacaactctccggctgcctttcatgcagttgcatgccagagtcatagagcaaaatgtaaagtcggagataacagcaacagatggcatgaattggggaatctacatatacggggagaaagtagagaggagcccgctccttcctagcaatgcaatccttgcagtttgggcagatcgctgtactataacctcagcccgtcacaatcatgttaacgcacctgggagaataatatcgactttcacacttgggtcgggagtaacgggtataacctctatgcacggggaacccagtttggacccttggaatggtgtttctctcgactcagcttcccctacggcatttagtgctttacctcgccaaagtaggaatatatccttcacaagtattccagtagaggtggtgactgatcctagcatcttgctgggcatgcagaccaccgtgctaattgcggagctagtcaaggtatgtcgcccaccatcacccgacatgatgagtgctgtagcggagcacgcgctttggctcaatgatgtcttacttcaagttgtccagaaagaatcgcagatgcaagggactgcgccctacaacgagtgccttgcacttttgggtcgcattgaatgtgtgatgaaaatcgggagatttgtctcagtagtgcctcagctgcaatacagaatgtatggtaacctcatcaaacaaatggcccaagtagcacaaaactacgaccaagaattcaagcaattcaagttattcatcatccaaaaccaaatctttggcagctatttgcttcagcagaacaaggcatttgctgacagggagctgcagatggagagctttcattcagcggtcatttctcaaagaaggcaggagttgaatactgccatcgcaaagatggagcgaatgagcttgcaaatggaggaagagaatagagcaatggagcaagctcaaaaggaaatggaagaaggattgagggagttccagaataggcaagttgcaagggccgtatttgccgttcttaaagccgtagctatgattgcgcttgcattcgtcacggctggtgcgacggctcctggagctgcggcgtccgcggggcaagctgtgagcatagcactcatgtacgagtaccttctaacacccacggagctcacagtatggccactgggtatggataccgtggccaacttgctcattgcgcaggagaatgctgcactggtgggattaattcagctagggccctcgtcgaattttacgagcagacatgtggtgaaaggcatacctgtgagcttgctgctcgatggtgaggattgggagttcgagatccctgtgcaagctggcatgtccagcttccctttcaactggactcgggtcaggattcggcacctggagatgcaatttgcgcaggaggcgagtggtggtgacgagattatccaccagccttccacccggtcggggattgtttacatcctcctgcagggctccactatcttccatgaccgcagaagagatgaggtgatgacctttcaggcagcggacccgctcaacttccaatatgcgtaccgcctcgacactggcgaagccactctaacgaatgagccctcggaagagtttgcgaacacgttcatgcagatgacacccttcactcgctggaggcttcgtctctctgcgtccgcctcagagaatgcagaattagcgtttccaacagctacagctcccgactccactaccgaggttgtcatcacgttccatgttacggcaatcagacaagttgactggcggcaggaggagaaagaggaggag

SEQ ID NO: 63 - protein, 657 aa, Bacillus thuringiensis
MTSNRKNENEIINALSIPAVSNHSAQMDLSLDARIEDSLCIAEGNNINPLVSASTVQTGINIAGRILGVLGVPFAGQLASFYSFLVGELWPSGRDPWEIFLEHVEQLIRQQVTENTRNTAIARLEGLGRGYRSYQQALETWLDNRNDARSRSIILERYVALELDITTAIPLFRIRNEEVPLLMVYAQAANLHLLLLRDASLFGSEWGMASSDVNQYYQEQIRYTEEYSNHCVQWYNTGLNNLRGTNAESWLRYNQFRRDLTLGVLDLVALFPSYDTRTYPINTSAQLTREIYTDPIGRTNAPSGFASTNWFNNNAPSFSAIEAAIFRPPHLLDFPEQLTIYSASSRWSSTQHMNYWVGHRLNFRPIGGTLNTSTQGLTNNTSINPVTLQFTSRDVYRTESNAGTNILFTTPVNGVPWARFNFINPQNIYERGATTYSQPYQGVGIQLFDSETELPPETTERPNYESYSHRLSHIGLIIGNTLRAPVYSWTHRSADRTNTIGPNRITQIPAVKGRFLFNGSVISGPGFTGGDVVRLNRNNGNIQNRGYIEVPIQFTSTSTRYRVRVRYASVTSIELNVNLGNSSIFTNTLPATAASLDNLQSGDFGYVEINNAFTSATGNIVGARNFSANAEVIIDRFEFIPVTATFEAEYDLERAQK

SEQ ID NO: 64 - DNA, 1971 bp, Bacillus thuringiensis
atgccttcaaataggaaaaatgagaatgaaattataaatgccttatcgattccagctgtatcgaatcattccgcacaaatggatctatcgctagatgctcgtattgaggattctttgtgtatagccgaggggaataatatcaatccacttgttagcgcatcaacagtccaaacgggtataaacatagctggtagaatattgggcgtattaggtgtgccgtttgctggacaactagctagtttttatagttttcttgttggggaattatggcctagtggcagagatccatgggaaattttcctggaacatgtagaacaacttataagacaacaagtaacagaaaatactaggaatacggctattgctcgattagaaggtctaggaagaggctatagatcttaccagcaggctcttgaaacttggttagataaccgaaatgatgcaagatcaagaagcattattcttgagcgctatgttgctttagaacttgacattactactgctataccgcttttcagaatacgaaatgaagaagttccattattaatggtatatgctcaagctgcaaatttacacctattattattgagagacgcatccctttttggtagtgaatgggggatggcatcttccgatgttaaccaatattaccaagaacaaatcagatatacagaggaatattctaaccattgcgtacaatggtataatacagggctaaataacttaagagggacaaatgctgaaagttggttgcggtataatcaattccgtagagacctaacgttaggggtattagatttagtagccctattcccaagctatgatactcgcacttatccaatcaatacgagtgctcagttaacaagagaaatttatacagatccaattgggagaacaaatgcaccttcaggatttgcaagtacgaattggtttaataataatgcaccatcgttttctgccatagaggctgccattttcaggcctccgcatctacttgattttccagaacaacttacaatttacagtgcatcaagccgttggagtagcactcaacatatgaattattgggtgggacataggcttaacttccgcccaataggagggacattaaatacctcaacacaaggacttactaataatacttcaattaatcctgtaacattacagtttacgtctcgtgacgtttatagaacagaatcaaatgcagggacaaatatactatttactactcctgtgaatggagtaccttgggctagatttaattttataaaccctcagaatatttatgaaagaggcgccactacctacagtcaaccgtatcagggagttgggattcaattatttgattcagaaactgaattaccaccagaaacaacagaacgaccaaattatgaatcatatagtcatagattatctcatataggactaatcataggaaacactttgagagcaccagtctattcttggacgcatcgtagtgcagatcgtacgaatacgattggaccaaatagaattactcaaattcctgcagtgaagggaagatttctttttaatggttctgtaatttcaggaccaggatttactggtggagacgtagttagattgaataggaataatggtaatattcaaaatagagggtatattgaagttccaattcaattcacgtcgacatctaccagatatcgagttcgagtacgttatgcttctgtaacctcgattgagctcaatgttaatttgggcaattcatcaatttttacgaacacattaccagcaacagctgcatcattagataatctacaatcaggggattttggttatgttgaaatcaacaatgcttttacatccgcaacaggtaatatagtaggtgctagaaattttagtgcaaatgcagaagtaataatagacagatttgaatttatcccagttactgcaaccttcgaggcagaatatgatttagaaagagcacaaaag

SEQ ID NO: 65 - protein, 651 aa, Artificial Sequence
  Cry1B variant
MPSNRKNENEIINAVSNHSAQMDLSLDARIEDSLCVAEVNNIDPFVSASTVQTGISIAGRILGVLGVPFAGQLASFYSFLVGELWPSGRDPWEIFMEHVEQIVRQQITDSVRDTAIARLEGLGRGYRSYQQALETWLDNRNDARSRSIIRERYIALELDITTAIPLFSIRNQEVPLLMVYAQAANLHLLLLRDASLFGSEWGMSSSDVNQYYQEQIRYTEEYSNHCVQWYNTGLNNLRGTNAESWLRYNQFRRDLTLGVLDLVALFPSYDTRVYPMNTSAQLTREIYTDPIGRTNAPSGFASTNWFNNNAPSFSAIEAAIFRPPHLLDFPEQLTIYSASSRWSSTQHMNYWVGHRLNFRPIGGTLNTSTHGATNTSINPVTLQFTSRDVYRTESFAGTNILFTTPVNGVPWARFNFINPQNIYERGATTYSQPYQGVGIQLFDSETELPPETTERPNYESYSHRLSHIGLIIGNTLRAPVYSWTHRSADRTNTIGPNRITQIPAVKGRFLFNGSVISGPGFTGGDVVRLNRNNGNIQNRGYIEVPIQFTSTSTRYRVRVRYASVTSIELNVNLGNSSIFTNTLPATAASLDNLQSGDFGYVEINNAFTSATGNIVGARNFSANAEVIIDRFEFIPVTATFEAEYDLERAQK

SEQ ID NO: 66 - DNA, 1953 bp, Artificial Sequence
  encodes Cry1B variant
atgccttcaaataggaaaaatgagaatgaaattataaatgctgtatcgaatcattccgcacaaatggatctatcgctagatgctcgtattgaagatagcttgtgtgtagccgaggtgaacaatattgatccatttgttagcgcatcaacagtccaaacaggtattagtatagctggtagaatattgggcgtattaggtgtgccgtttgctggacaactagctagtttttatagttttcttgttggggaattatggcctagcggcagagatccatgggaaatttttatggaacatgtcgagcaaattgtaagacaacaaataacggacagtgttagggataccgctattgctcgtttagaaggtctaggaagagggtatagatcttaccagcaggctcttgaaacttggttagataaccgaaatgatgcaagatcaagaagcattattcgtgagagatatattgctttagaacttgacattactactgctataccgcttttcagcatacgaaatcaagaggttccattattaatggtatatgctcaagctgcaaatttacacctattattattgagagacgcatccctttttggtagtgaatgggggatgtcatcttccgatgttaaccaatattaccaagaacaaatcagatatacagaggaatattctaaccattgcgtacaatggtataatacagggctaaataacttaagagggacaaatgctgaaagttggttgcggtataatcaattccgtagagatctaacgttaggagtattagatctagtggcactattcccaagctatgacacgcgtgtttatccaatgaataccagtgctcaattaacaagagaaatttatacagatccaattgggagaacaaatgcaccttcaggatttgcaagtacgaattggtttaataataatgcaccatcgttttctgccatagaggctgccattttcaggcctccgcatctacttgattttccagaacaacttacaatttacagtgcatcaagccgttggagtagcactcaacatatgaattattgggtgggacataggcttaacttccgcccaataggagggacattaaatacctcaacgcatggggctaccaatacttctattaatcctgtaacattacagttcacatctcgagacgtttataggactgaatcatttgcagggacaaatatactatttactactcctgtgaatggagtaccttgggctagatttaattttataaaccctcagaatatttatgaaagaggcgccactacctacagtcaaccgtatcagggagttgggattcaattatttgattcagaaactgaattaccaccagaaacaacagaacgaccaaattatgaatcatatagtcatagattatctcatataggactaatcataggaaacactttgagagcaccagtctattcttggacgcaccgtagtgcagatcgtacgaatacgattggaccaaatagaattactcaaattcctgcagtgaagggaagatttctttttaatggttctgtaatttcaggaccaggatttactggtggagacgtagttagattgaataggaataatggtaatattcaaaatagagggtatattgaagttccaattcaattcacgtcgacatctaccagatatcgagttcgagtacgttatgcttctgtaacctcgattgagctcaatgttaatttgggcaattcatcaatttttacgaacacattaccagcaacagctgcatcattagataatctacaatcaggggattttggttatgttgaaatcaacaatgcttttacatccgcaacaggtaatatagtaggtgctagaaattttagtgcaaatgcagaagtaataatagacagatttgaatttatcccagttactgcaaccttcgaggcagaatatgatttagaaagagcacaaaag

SEQ ID NO: 67 - protein, 655 aa, Artificial Sequence
  Cry1B variant
MPSNRKNENEIINALSIPAVSNHSAQMDLSLDARIEDSLCIAEGNNINPLVSASTVQTGINIAGRILGVLGVPFAGQLASFYSFIVGELWPSGRDPWEIFMEHVEQLVRQQITENARNTALARLQGLGASFRAYQQSLEDWLENRDNARTRSVLYTQYIALELDFLNAMPLFAINNQQVPLLMVYAQAANLHLLLLRDASLFGSEFGLTSQEIQRYYERQAEKTREYSDYCARWYNTGLNNLRGTNAESWLRYNQFRRDLTLGVLDLVALFPSYDTRIYPINTSAQLTREIYTDPIGRTNAPSGFASTNWFNNNAPSFSAIEAAIFRPPHLLDFPEQLTIYSASSRWSSTQHMNYWVGHRLNFRPIGGTLNTSTHGATNTSINPVTLQFTSRDVYRTESYAGINILLTTPVNGVPWARFNWRNPLNSLRGSLLYTIGYTGVGTQLFDSETELPPETTERPNYESYSHRLSNIRLIIGNTLRAPVYSWTHRSADRTNTIATNIITQIPAVKGNFLFNGSVISGPGFTGGDLVRLNNSGNNIQNRGYIEVPIQFISTSTRYRVRVRYASVTPIQLSVNWGNSNIFSSIVPATATSLDNLQSRNFGYFESTNAFTSATGNVVGVRNFSENAGVIIDRFEFIPVTATFEAEYDLERAQE

SEQ ID NO: 68 - DNA, 1965 bp, Artificial Sequence
  encodes Cry1B variant
atgccgagcaatcgtaagaatgaaaatgaaatcattaacgcactgtccatccctgcagtgagcaatcacagcgcgcagatggatttgagcctggatgcgcgtatcgaggacagcctgtgtattgccgagggcaacaacatcaatccgttggtcagcgcgagcaccgtgcaaaccggcattaacattgccggtcgtatcctgggtgtcctgggcgttccgtttgcgggtcagctggcgagcttttacagctttatcgttggtgagttgtggccgtcgggtcgtgacccttgggagattttcatggagcacgtcgagcaactggtgcgccaacagattacggagaatgcgcgcaacaccgctctggcgcgtctgcaaggtctgggtgcaagcttccgcgcttaccagcagtccctggaagattggttggaaaaccgtgataatgcgcgcactcgctccgtcctgtacacgcagtacatcgcgctggagctggacttcttgaacgcgatgccgctgtttgcaatcaacaaccagcaagtgccgctgctgatggtctacgcccaagccgcgaatctgcacttgctgctgctgcgcgacgcatctctgttcggtagcgaatttggcctgaccagccaggagatccagcgctactatgagcgtcaggccgagaaaacgcgtgaatactccgactactgcgctcgttggtacaacacgggtctgaacaatctgcgtggcaccaacgcggagtcctggctgcgttacaaccagtttcgtcgcgatctgaccctgggtgttttggatttggttgcgctgtttccgagctatgacacccgcatctatccgatcaacaccagcgcgcaactgactcgtgaaatctatacggacccgattggccgcactaatgcaccgtccggtttcgcaagcaccaactggttcaataacaatgcaccgagcttcagcgcgatcgaggccgcgatctttcgtccgccgcacctgttggacttcccggagcagctgaccatctactctgcatctagccgttggagcagcacgcagcacatgaattactgggttggccatcgtctgaacttccgcccgattggtggtacgctgaacactagcacgcacggtgccactaacacgagcatcaacccggtgacgctgcaattcaccagccgtgatgtttaccgtaccgagtcctacgccggcatcaacattctgctgaccaccccggttaacggcgtcccttgggctcgtttcaattggcgtaacccactgaatagcctgcgtggttctttgctgtacaccattggttataccggcgtcggtacgcaactgtttgactcggaaactgagctgccaccggaaactaccgagcgtccgaactacgaatcttatagccaccgtctgtccaatatccgtctgatcatcggcaacaccctgcgtgcgccggtgtacagctggacccatcgtagcgccgatcgcacgaacacgattgccaccaacattatcacccagatcccggcagtgaaaggcaactttctgtttaacggcagcgtgatcagcggtccaggttttaccggcggtgacctggtgcgcctgaacaacagcggcaacaatatccaaaaccgtggttatatcgaagtcccgattcaattcatcagcacgagcacccgttaccgcgtccgtgttcgctacgcatccgttacgccgatccaactgagcgttaactggggcaattccaacattttcagcagcattgtccctgctacggcgacctctctggacaatttgcagagccgtaacttcggctatttcgaaagcaccaacgctttcaccagcgctacgggcaatgtggttggtgttcgcaatttcagcgagaatgcgggcgtcatcattgaccgttttgagtttatcccggtgaccgcgaccttcgaagcggagtacgatctggagcgtgcgcaggaa

SEQ ID NO: 69 - protein, 655 aa, Artificial Sequence
  Cry1B variant
MPSNRKNENGIINALSIPAVSNHSAQMDLSPDARIEDSLCVAEVNNIDPFVSASTVQTGINIAGRILGVLGVPFAGQLASFYSFIVGELWPSGRDPWEIFLEHVEQLVRQQITENARNTALARLQGLGASFRAYQQSLEDWLENRDDARTRSVLYTQYIALELDFLNAMPLFAINNQRVPLLMVYAQAANLHLLLLRDASLFGSEFGLTSQEIQRYYERQAEKTREYSDYCARWYNTGLNNLRGTNAESWLRYNQFRRDLTLGVLDLVALFPSYDTRVYPINTSAQLTREIYTDPIGRTNAPSGFASTNWFNNNAPSFSAIEAAVIRPPHLLDFPEQLTIFSVLSRWSSTQHMNYWVGHRLESRTIRGSLSTSTHGNTNTSINPVTLQFTSRDVYRTESYAGINILLTTPVNGVPWARFNWRNPLNSLRGSLLYTIGYTGVGTQLFDSETELPPETTERPNYESYSHRLSHIGLIIGNTLRAPVYSWTHRSADRTNTTGPNRITQIPAVKGNFLFNGSVISGPGFTGGDLVRLNNSGNNIQNRGYLEVPIQFISTSTRYRVRVRYASVTPIQLSVNWGNSNIFSSIVPATATSLDNLQSRDFGYFESTNAFTSATGNVVGVRNFSENAGVIIDRFEFIPVTATFEAEYDLERAQE

SEQ ID NO: 70 - DNA, 1965 bp, Artificial Sequence
  encodes Cry1B variant
atgccgagcaatcgtaagaatgaaaatggaatcattaacgcgctgtccatccctgcagtgagcaatcacagcgcgcagatggatttgagcccggatgcgcgtatcgaggacagcctgtgtgtcgccgaggtaaacaatattgatccgttcgtcagcgcgagcaccgtgcaaaccggcattaacattgccggtcgtatcctgggtgtcctgggcgttccgtttgcgggtcagctggcgagcttttacagctttatcgttggtgagttgtggccgtcgggtcgtgacccttgggagattttcttggagcacgtcgagcaactggtgcgccaacagattacggagaatgcgcgcaacaccgctctggcgcgtctgcaaggtctgggtgcaagcttccgcgcttaccagcagtccctggaagattggttggaaaaccgtgatgatgcgcgcactcgctccgtcctgtacacgcagtacatcgcgctggagctggacttcttgaacgcgatgccgctgtttgcaatcaacaaccagcgagtgccgctgctgatggtctacgcccaagccgcgaatctgcacttgctgctgctgcgcgacgcatctctgttcggtagcgaatttggcctgaccagccaggagatccagcgctactatgagcgtcaggccgagaaaacgcgtgaatactccgactactgcgctcgttggtacaacacgggtctgaacaatctgcgtggcaccaacgcggagtcctggctgcgttataaccagtttcgtcgcgatctgaccctgggtgtattggatttggttgcgctgtttccgagctatgacacccgcgtgtatccgatcaacaccagcgcgcaactgactcgtgaaatctatacggacccgattggccgcactaatgcaccgtccggtttcgcaagcaccaactggttcaataacaatgcaccgagcttcagcgcgatcgaggcggctgtcatccgtccgccgcacctgttggacttcccggagcagctgaccatcttttctgtgttgtctcgttggagcagcacgcagcacatgaattactgggttggccatcgtctggaaagccgcaccattcgcggtagcctgagcactagcacgcacggtaatactaacacgagcatcaacccggtgacgctgcaattcaccagccgtgatgtttaccgtaccgagtcctacgccggcatcaacattctgctgaccaccccggttaacggcgtcccttgggctcgtttcaattggcgtaacccactgaatagcctgcgtggttctttgctgtacaccattggttataccggcgtcggtacgcaactgtttgactcggaaactgagctgccaccggaaactaccgagcgtccgaactacgaatcttatagccaccgtctgtcccatattggtctgatcatcggcaacaccctgcgtgcaccggtgtacagctggacccatcgtagcgccgatcgcacgaacacgactggtccgaaccgtatcacccagatcccggcagtgaaaggcaactttctgtttaacggcagcgtgatcagcggtccaggttttaccggcggtgacctggtgcgcctgaacaacagcggcaacaatatccaaaaccgtggttatctggaagtcccgattcaattcatcagcacgagcacccgttaccgcgtccgtgttcgctacgcatccgttacgccgatccaactgagcgttaactggggcaattccaacattttcagcagcattgtccctgctacggcgacctctctggacaatttgcagagccgtgacttcggctatttcgaaagcaccaacgctttcaccagcgctacgggcaatgtggttggtgttcgcaatttcagcgagaatgcgggcgtcatcattgaccgttttgagtttatcccggtgaccgcgaccttcgaagcggagtacgatctggagcgtgcgcaggaa

SEQ ID NO: 71 - protein, 650 aa, Artificial Sequence
  Cry1B variant
MPSNRKNENEIINAVSNHSAQMDLSPDARIEDSLCVAEVNNIDPFVSASTVQTGINIAGRILGVLGVPFAGQLASFYSFLVGELWPSGRDPWEIFMEHVEQIVRQQITENARNTALARLQGLGASFRAYQQSLEDWLENRDDARTRSVLYTQYIALELDFLNAMPLFAINNQQVPLLMVYAQAANLHLLLLRDASLFGSEFGLTSQEIQRYYERQAEKTREYSDYCARWYNTGLNNLRGTNAESWLRYNQFRRDLTLGVLDLVALFPSYDTRIYPINTSAQLTREIYTDPIGRTNAPSGFASTNWFNNNAPSFSAIEAAVIRPPHLLDFPEQLTIYSASSRWSSTQHMNYWVGHRLNFRPIGGTLNTSTHGATNTSINPVTLQFTSRDVYRTESYAGINILLTTPVNGVPWARFNWRNPLNSLRGSLLYTIGYTGVGIQLFDSETELPPETTERPNYESYSHRLSNIRLISGNTLRAPVYSWTHRSADRTNTIATNIITQIPAVKGNFLFNGSVTSGPGFTGGDLVRLNNSGNNIQNRGYLEVPIQFISTSTRYRVRVRYASVTPIQLSVNWGNSNIFSSIVPATATSLDNLQSRDFGYFESTNAFTSATGNVVGVRNFSENAGVIIDRFEFIPVTATFEAEYDLERAQE

SEQ ID NO: 72 - DNA, 1950 bp, Artificial Sequence
  encodes Cry1B variant
atgccgagcaatcgtaagaatgaaaatgaaatcattaacgcagtgagcaatcacagcgcgcagatggatttgagcccggatgcgcgtatcgaggacagcctgtgtgtcgccgaggtaaacaatattgatccgttcgtcagcgcgagcaccgtgcaaaccggcattaacattgccggtcgtatcctgggtgtcctgggcgttccgtttgcgggtcagctggcgagcttttacagctttttggttggtgagttgtggccgtcgggtcgtgacccttgggagattttcatggagcacgtcgagcaaattgtgcgccaacagattacggagaatgcgcgcaacaccgctctggcgcgtctgcaaggtctgggtgcaagcttccgcgcttaccagcagtccctggaagattggttggaaaaccgtgatgatgcgcgcactcgctccgtcctgtacacgcagtacatcgcgctggagctggacttcttgaacgcgatgccgctgtttgcaatcaacaaccagcaagtgccgctgctgatggtctacgcccaagccgcgaatctgcacttgctgctgctgcgcgacgcatctctgttcggtagcgaatttggcctgaccagccaggagatccagcgctactatgagcgtcaggccgagaaaacgcgtgaatactccgactactgcgctcgttggtacaacacgggtctgaacaatctgcgtggcaccaacgcggagtcctggctgcgttacaaccagtttcgtcgcgatctgaccctgggtgttttggatttggttgcgctgtttccgagctatgacacccgcatctatccgatcaacaccagcgcgcaactgactcgtgaaatctatacggacccgattggccgcactaatgcaccgtccggtttcgcaagcaccaactggttcaataacaatgcaccgagcttcagcgcgatcgaggcggctgtcatccgtccgccgcacctgttggacttcccggagcagctgaccatctactctgcatctagccgttggagcagcacgcagcacatgaattactgggttggccatcgtctgaacttccgcccgattggtggtacgctgaacactagcacgcacggtgccactaacacgagcatcaacccggtgacgctgcaattcaccagccgtgatgtttaccgtaccgagtcctacgccgggatcaacattctgctgaccaccccggttaacggcgtcccttgggctcgtttcaattggcgtaacccactgaatagcctgcgtggttctttgctgtacaccattggttataccggcgtcggtattcaactgtttgactcggaaactgagctgccaccggaaactaccgagcgtccgaactacgaatcttatagccaccgtctgtccaatatccgtctgatcagcggcaacaccctgcgtgcgccggtgtacagctggacccaccgtagcgccgatcgcacgaacacgattgccaccaacattatcacccagatcccggcagtgaaaggcaactttctgtttaacggcagcgtgaccagcggtccaggttttaccggcggtgacctggtgcgcctgaacaacagcggcaacaatatccaaaaccgtggttatctggaagtcccgattcaattcatcagcacgagcacccgttaccgcgtccgtgttcgctacgcatccgttacgccgatccaactgagcgttaactggggcaattccaacattttcagcagcattgtccctgctacggcgacctctctggacaatttgcagagccgtgacttcggctatttcgaaagcaccaacgctttcaccagcgctacgggcaatgtggttggtgttcgcaatttcagcgagaatgcgggcgtcatcattgaccgttttgagtttatcccggtgaccgcgaccttcgaagcggagtacgatctggagcgtgcgcaggaa

SEQ ID NO: 73 - protein, 655 aa, Artificial Sequence
  Cry1B variant
MPSNRKNENEIINALSIPAVSNHSAQMDLSLDARIEDSLCIAEGNNINPLVSASTVQTGINIAGRILGVLGVPFAGQLASFYSFIVGELWPSGRDPWEIFMEHVEQLVRQQITENARNTALARLQGLGASFRAYQQSLEDWLENRDNARTRSVLYTQYIALELDFLNAMPLFAINNQQVPLLMVYAQAANLHLLLLRDASLFGSEFGLTSQEIQRYYERQAEKTREYSDYCARWYNTGLNNLRGTNAESWLRYNQFRRDLTLGVLDLVALFPSYDTRIYPINTSAQLTREIYTDPIGRTNAPSGFASTNWFNNNAPSFSAIEAAIFRPPHLLDFPEQLTIYSASSRWSSTQHMNYWVGHRLNFRPIGGTLNTSTHGATNTSINPVTLQFTSRDVYRTESYAGINILLTTPVNGVPWARFNWRNPLNSLRGSLLYTIGYTGVGTQLFDSETELPPETTERPNYESYSHRLSNIRLIIGNTLRAPVYSWTHRSADRTNTIATNIITQIPAVKGNFLFNGSVISGPGFTGGDLVRLNNSGNNIQNRGYIEVPIQFISTSTRYRVRVRYASVTPIQLSVNWGNSNIFSRIVPATAYSLDNLQSRNFGYFESTNAFTSATGNVVGVRNFSENAGVIIDRFEFIPVTATFEAEYDLERAQE

SEQ ID NO: 74 - DNA, 1965 bp, Artificial Sequence
  encodes Cry1B variant
atgccgagcaatcgtaagaatgaaaatgaaatcattaacgcactgtccatccctgcagtgagcaatcacagcgcgcagatggatttgagcctggatgcgcgtatcgaggacagcctgtgtattgccgagggcaacaacatcaatccgttggtcagcgcgagcaccgtgcaaaccggcattaacattgccggtcgtatcctgggtgtcctgggcgttccgtttgcgggtcagctggcgagcttttacagctttatcgttggtgagttgtggccgtcgggtcgtgacccttgggagattttcatggagcacgtcgagcaactggtgcgccaacagattacggagaatgcgcgcaacaccgctctggcgcgtctgcaaggtctgggtgcaagcttccgcgcttaccagcagtccctggaagattggttggaaaaccgtgataatgcgcgcactcgctccgtcctgtacacgcagtacatcgcgctggagctggacttcttgaacgcgatgccgctgtttgcaatcaacaaccagcaagtgccgctgctgatggtctacgcccaagccgcgaatctgcacttgctgctgctgcgcgacgcatctctgttcggtagcgaatttggcctgaccagccaggagatccagcgctactatgagcgtcaggccgagaaaacgcgtgaatactccgactactgcgctcgttggtacaacacgggtctgaacaatctgcgtggcaccaacgcggagtcctggctgcgttacaaccagtttcgtcgcgatctgaccctgggtgttttggatttggttgcgctgtttccgagctatgacacccgcatctatccgatcaacaccagcgcgcaactgactcgtgaaatctatacggacccgattggccgcactaatgcaccgtccggtttcgcaagcaccaactggttcaataacaatgcaccgagcttcagcgcgatcgaggccgcgatctttcgtccgccgcacctgttggacttcccggagcagctgaccatctactctgcatctagccgttggagcagcacgcagcacatgaattactgggttggccatcgtctgaacttccgcccgattggtggtacgctgaacactagcacgcacggtgccactaacacgagcatcaacccggtgacgctgcaattcaccagccgtgatgtttaccgtaccgagtcctacgccggcatcaacattctgctgaccaccccggttaacggcgtcccttgggctcgtttcaattggcgtaacccactgaatagcctgcgtggttctttgctgtacaccattggttataccggcgtcggtacgcaactgtttgactcggaaactgagctgccaccggaaactaccgagcgtccgaactacgaatcttatagccaccgtctgtccaatatccgtctgatcatcggcaacaccctgcgtgcgccggtgtacagctggacccatcgtagcgccgatcgcacgaacacgattgccaccaacattatcacccagatcccggcagtgaaaggcaactttctgtttaacggcagcgtgatcagcggtccaggttttaccggcggtgacctggtgcgcctgaacaacagcggcaacaatatccaaaaccgtggttatatcgaagtcccgattcaattcatcagcacgagcacccgttaccgcgtccgtgttcgctacgcatccgttacgccgatccaactgagcgttaactggggcaattccaacattttcagccgcattgtccctgctacggcgtactctctggacaatttgcagagccgtaacttcggctatttcgaaagcaccaacgctttcaccagcgctacgggcaatgtggttggtgttcgcaatttcagcgagaatgcgggcgtcatcattgaccgttttgagtttatcccggtgaccgcgaccttcgaagcggagtacgatctggagcgtgcgcaggaa

SEQ ID NO: 75 - protein, 655 aa, Artificial Sequence
  Cry1B variant
MPSNRKNENEIINALSIPAVSNHSAQMDLSLDARIEDSLCIAEGNNINPLVSASTVQTGINIAGRILGVLGVPFAGQLASFYSFIVGELWPSGRDPWEIFMEHVEQLVRQQITENARNTALARLQGLGASFRAYQQSLEDWLENRDNARTRSVLYTQYIALELDFLNAMPLFAINNQQVPLLMVYAQAANLHLLLLRDASLFGSEFGLTSQEIQRYYERQAEKTREYSDYCARWYNTGLNNLRGTNAESWLRYNQFRRDLTLGVLDLVALFPSYDTRIYPINTSAQLTREIYTDPIGRTNAPSGFASTNWFNNNAPSFSAIEAAIFRPPHLLDFPEQLTIYSASSRWSSTQHMNYWVGHRLNFRPIGGTLNTSTHGATNTSINPVTLQFTSRDVYRTESYAGINILLTTPVNGVPWARFNWRNPLNSLRGSLLYTIGYTGVGTQLFDSETELPPETTERPNYESYSHRLSNIRLIIGNTLRAPVYSWTHRSADRTNTIATNIITQIPAVKGNFLFNGSVISGPGFTGGDLVRLNNSGNNIQNRGYIEVPIQFISTSTRYRVRVRYASVTPIRLSVNWGNSNIFSSIVPATATSLDNLQSRNFGYFESRNAFTSATGNVVGVRNFSENAGVIIDRFEFIPVTATFEAEYDLERAQE

SEQ ID NO: 76 - DNA, 1965 bp, Artificial Sequence
  encodes Cry1B variant
atgccgagcaatcgtaagaatgaaaatgaaatcattaacgcactgtccatccctgcagtgagcaatcacagcgcgcagatggatttgagcctggatgcgcgtatcgaggacagcctgtgtattgccgagggcaacaacatcaatccgttggtcagcgcgagcaccgtgcaaaccggcattaacattgccggtcgtatcctgggtgtcctgggcgttccgtttgcgggtcagctggcgagcttttacagctttatcgttggtgagttgtggccgtcgggtcgtgacccttgggagattttcatggagcacgtcgagcaactggtgcgccaacagattacggagaatgcgcgcaacaccgctctggcgcgtctgcaaggtctgggtgcaagcttccgcgcttaccagcagtccctggaagattggttggaaaaccgtgataatgcgcgcactcgctccgtcctgtacacgcagtacatcgcgctggagctggacttcttgaacgcgatgccgctgtttgcaatcaacaaccagcaagtgccgctgctgatggtctacgcccaagccgcgaatctgcacttgctgctgctgcgcgacgcatctctgttcggtagcgaatttggcctgaccagccaggagatccagcgctactatgagcgtcaggccgagaaaacgcgtgaatactccgactactgcgctcgttggtacaacacgggtctgaacaatctgcgtggcaccaacgcggagtcctggctgcgttacaaccagtttcgtcgcgatctgaccctgggtgttttggatttggttgcgctgtttccgagctatgacacccgcatctatccgatcaacaccagcgcgcaactgactcgtgaaatctatacggacccgattggccgcactaatgcaccgtccggtttcgcaagcaccaactggttcaataacaatgcaccgagcttcagcgcgatcgaggccgcgatctttcgtccgccgcacctgttggacttcccggagcagctgaccatctactctgcatctagccgttggagcagcacgcagcacatgaattactgggttggccatcgtctgaacttccgcccgattggtggtacgctgaacactagcacgcacggtgccactaacacgagcatcaacccggtgacgctgcaattcaccagccgtgatgtttaccgtaccgagtcctacgccggcatcaacattctgctgaccaccccggttaacggcgtcccttgggctcgtttcaattggcgtaacccactgaatagcctgcgtggttctttgctgtacaccattggttataccggcgtcggtacgcaactgtttgactcggaaactgagctgccaccggaaactaccgagcgtccgaactacgaatcttatagccaccgtctgtccaatatccgtctgatcatcggcaacaccctgcgtgcgccggtgtacagctggacccatcgtagcgccgatcgcacgaacacgattgccaccaacattatcacccagatcccggcagtgaaaggcaactttctgtttaacggcagcgtgatcagcggtccaggttttaccggcggtgacctggtgcgcctgaacaacagcggcaacaatatccaaaaccgtggttatatcgaagtcccgattcaattcatcagcacgagcacccgttaccgcgtccgtgttcgctacgcatccgttacgccgatccgcctgagcgttaactggggcaattccaacattttcagcagcattgtccctgctacggcgacctctctggacaatttgcagagccgtaacttcggctatttcgaaagccgcaacgctttcaccagcgctacgggcaatgtggttggtgttcgcaatttcagcgagaatgcgggcgtcatcattgaccgttttgagtttatcccggtgaccgcgaccttcgaagcggagtacgatctggagcgtgcgcaggaa

SEQ ID NO: 77 - protein, 655 aa, Artificial Sequence
  Cry1B variant
MPSNRKNENEIINALSIPAVSNHSAQMDLSLDARIEDSLCIAEGNNINPLVSASTVQTGINIAGRILGVLGVPFAGQLASFYSFIVGELWPSGRDPWEIFMEHVEQLVRQQITENARNTALARLQGLGASFRAYQQSLEDWLENRDNARTRSVLYTQYIALELDFLNAMPLFAINNQQVPLLMVYAQAANLHLLLLRDASLFGSEFGLTSQEIQRYYERQAEKTREYSDYCARWYNTGLNNLRGTNAESWLRYNQFRRDLTLGVLDLVALFPSYDTRIYPINTSAQLTREIYTDPIGRTNAPSGFASTNWFNNNAPSFSAIEAAIFRPPHLLDFPEQLTIYSASSRWSSTQHMNYWVGHRLNFRPIGGTLNTSTHGATNTSINPVTLQFTSRDVYRTESYAGINILLTTPVNGVPWARFNWRNPLNSLRGSLLYTIGYTGVGTQLFDSETELPPETTERPNYESYSHRLSNIRLIISNTLRAPVYSWTHRSADRTNTIATNIITQIPAVKGNFLFNGSVISGPGFTGGDLVRLNNSGNNIQNRGYIEVPIQFISTSTRYRVRVRYASVTPIRLSVNWGNSNIFSSIVPATATSLDNLQSRNFGYFESRNAFTSATGNVVGVRNFSENAGVIIDRFEFIPVTATFEAEYDLERAQE

SEQ ID NO: 78 - DNA, 1965 bp, Artificial Sequence
  encodes Cry1B variant
atgccgagcaatcgtaagaatgaaaatgaaatcattaacgcactgtccatccctgcagtgagcaatcacagcgcgcagatggatttgagcctggatgcgcgtatcgaggacagcctgtgtattgccgagggcaacaacatcaatccgttggtcagcgcgagcaccgtgcaaaccggcattaacattgccggtcgtatcctgggtgtcctgggcgttccgtttgcgggtcagctggcgagcttttacagctttatcgttggtgagttgtggccgtcgggtcgtgacccttgggagattttcatggagcacgtcgagcaactggtgcgccaacagattacggagaatgcgcgcaacaccgctctggcgcgtctgcaaggtctgggtgcaagcttccgcgcttaccagcagtccctggaagattggttggaaaaccgtgataatgcgcgcactcgctccgtcctgtacacgcagtacatcgcgctggagctggacttcttgaacgcgatgccgctgtttgcaatcaacaaccagcaagtgccgctgctgatggtctacgcccaagccgcgaatctgcacttgctgctgctgcgcgacgcatctctgttcggtagcgaatttggcctgaccagccaggagatccagcgctactatgagcgtcaggccgagaaaacgcgtgaatactccgactactgcgctcgttggtacaacacgggtctgaacaatctgcgtggcaccaacgcggagtcctggctgcgttacaaccagtttcgtcgcgatctgaccctgggtgttttggatttggttgcgctgtttccgagctatgacacccgcatctatccgatcaacaccagcgcgcaactgactcgtgaaatctatacggacccgattggccgcactaatgcaccgtccggtttcgcaagcaccaactggttcaataacaatgcaccgagcttcagcgcgatcgaggccgcgatctttcgtccgccgcacctgttggacttcccggagcagctgaccatctactctgcatctagccgttggagcagcacgcagcacatgaattactgggttggccatcgtctgaacttccgcccgattggtggtacgctgaacactagcacgcacggtgccactaacacgagcatcaacccggtgacgctgcaattcaccagccgtgatgtttaccgtaccgagtcctacgccggcatcaacattctgctgaccaccccggttaacggcgtcccttgggctcgtttcaattggcgtaacccactgaatagcctgcgtggttctttgctgtacaccattggttataccggcgtcggtacgcaactgtttgactcggaaactgagctgccaccggaaactaccgagcgtccgaactacgaatcttatagccaccgtctgtccaatatccgtctgatcatcagcaacaccctgcgtgcgccggtgtacagctggacccatcgtagcgccgatcgcacgaacacgattgccaccaacattatcacccagatcccggcagtgaaaggcaactttctgtttaacggcagcgtgatcagcggtccaggttttaccggcggtgacctggtgcgcctgaacaacagcggcaacaatatccaaaaccgtggttatatcgaagtcccgattcaattcatcagcacgagcacccgttaccgcgtccgtgttcgctacgcatccgttacgccgatccgcctgagcgttaactggggcaattccaacattttcagcagcattgtccctgctacggcgacctctctggacaatttgcagagccgtaacttcggctatttcgaaagccgcaacgctttcaccagcgctacgggcaatgtggttggtgttcgcaatttcagcgagaatgcgggcgtcatcattgaccgttttgagtttatcccggtgaccgcgaccttcgaagcggagtacgatctggagcgtgcgcaggaa

SEQ ID NO: 79 - protein, 655 aa, Artificial Sequence
  Cry1B variant
MPSNRKNENEIINALSIPAVSNHSAQMDLSLDARIEDSLCIAEGNNINPLVSASTVQTGINIAGRILGVLGVPFAGQLASFYSFIVGELWPSGRDPWEIFMEHVEQLVRQAITLNARNTALARLQGLGASFRAYQQSLEDWLENRDNARTRSVLYTQYIALELDFLNAMPLFAINNQQVPLLMVYAQAANLHLLLLRDASLFGSEFGLTSQEIQRYYERQAEKTREYSDYCARWYNTGLNNLRGTNAESWLRYNQFRRDLTLGVLDLVALFPSYDTRIYPINTSAQLTREIYTDPIGRTNAPSGFASTNWFNNNAPSFSAIEAAIFRPPHLLDFPEQLTIYSASSRWSSTQHMNYWVGHRLNFRPIGGTLNTSTHGATNTSINPVTLQFTSRDVYRTESYAGINILLTTPVNGVPWARFNWRNPLNSLRGSLLYTIGYTGVGTQLFDSETELPPETTERPNYESYSHRLSNIRLIISGTLRAPVYSWTHRSADRTNTIATNIITQIPAVKGNFLFNGSVISGPGFTGGDLVRLNNSGNNIQNRGYIEVPIQFISTSTRYRVRVRYASVTPIRLSVNWGNSNIFSSIVPATATSLDNLQSRNFGYFESRNAFTSATGNVVGVRNFSENAGVIIDRFEFIPVTATFEAEYDLERAQE

SEQ ID NO: 80 - DNA, 1965 bp, Artificial Sequence
  encodes Cry1B variant
atgccgagcaatcgtaagaatgaaaatgaaatcattaacgcactgtccatccctgcagtgagcaatcacagcgcgcagatggatttgagcctggatgcgcgtatcgaggacagcctgtgtattgccgagggcaacaacatcaatccgttggtcagcgcgagcaccgtgcaaaccggcattaacattgccggtcgtatcctgggtgtcctgggcgttccgtttgcgggtcagctggcgagcttttacagctttatcgttggtgagttgtggccgtcgggtcgtgacccttgggagattttcatggagcacgtcgagcaactggtgcgccaagcgattacgctgaatgcgcgcaacaccgctctggcgcgtctgcaaggtctgggtgcaagcttccgcgcttaccagcagtccctggaagattggttggaaaaccgtgataatgcgcgcactcgctccgtcctgtacacgcagtacatcgcgctggagctggacttcttgaacgcgatgccgctgtttgcaatcaacaaccagcaagtgccgctgctgatggtctacgcccaagccgcgaatctgcacttgctgctgctgcgcgacgcatctctgttcggtagcgaatttggcctgaccagccaggagatccagcgctactatgagcgtcaggccgagaaaacgcgtgaatactccgactactgcgctcgttggtacaacacgggtctgaacaatctgcgtggcaccaacgcggagtcctggctgcgttacaaccagtttcgtcgcgatctgaccctgggtgttttggatttggttgcgctgtttccgagctatgacacccgcatctatccgatcaacaccagcgcgcaactgactcgtgaaatctatacggacccgattggccgcactaatgcaccgtccggtttcgcaagcaccaactggttcaataacaatgcaccgagcttcagcgcgatcgaggccgcgatctttcgtccgccgcacctgttggacttcccggagcagctgaccatctactctgcatctagccgttggagcagcacgcagcacatgaattactgggttggccatcgtctgaacttccgcccgattggtggtacgctgaacactagcacgcacggtgccactaacacgagcatcaacccggtgacgctgcaattcaccagccgtgatgtttaccgtaccgagtcctacgccggcatcaacattctgctgaccaccccggttaacggcgtcccttgggctcgtttcaattggcgtaacccactgaatagcctgcgtggttctttgctgtacaccattggttataccggcgtcggtacgcaactgtttgactcggaaactgagctgccaccggaaactaccgagcgtccgaactacgaatcttatagccaccgtctgtccaatatccgtctgatcatcagcggcaccctgcgtgcgccggtgtacagctggacccatcgtagcgccgatcgcacgaacacgattgccaccaacattatcacccagatcccggcagtgaaaggcaactttctgtttaacggcagcgtgatcagcggtccaggttttaccggcggtgacctggtgcgcctgaacaacagcggcaacaatatccaaaaccgtggttatatcgaagtcccgattcaattcatcagcacgagcacccgttaccgcgtccgtgttcgctacgcatccgttacgccgatccgcctgagcgttaactggggcaattccaacattttcagcagcattgtccctgctacggcgacctctctggacaatttgcagagccgtaacttcggctatttcgaaagccgcaacgctttcaccagcgctacgggcaatgtggttggtgttcgcaatttcagcgagaatgcgggcgtcatcattgaccgttttgagtttatcccggtgaccgcgaccttcgaagcggagtacgatctggagcgtgcgcaggaa

SEQ ID NO: 81 - protein, 655 aa, Artificial Sequence
  Cry1B variant
MPSNRKNENEIINALSIPAVSNHSAQMDLSLDARIEDSLCIAEGNNINPLVSASTVQTGINIAGRILGVLGVPFAGQLASFYSFIVGELWPSGRDPWEIFMEHVEQLVRQAITLNARNTALARLQGLGASFRAYQQSLEDWLENRDNARTRSVLYTQYIALELDFLNAMPLFAINNQQVPLLMVYAQAANLHLLLLRDASLFGSEFGLTSQEIQRYYERQAEKTREYSDYCARWYNTGLNNLRGTNAESWLRYNQFRRDLTLGVLDLVALFPSYDTRIYPINTSAQLTREIYTDPIGRTNAPSGFASTNWFNNNAPSFSAIEAAIFRPPHLLDFPEQLTIYSASSRWSSTQHMNYWVGHRLYFRPINGTLNTSTHGATNTSINPVTLQFTSRDVYRTESYAGINILLTTPVNGVPWARFNWRNPLNSLRGSLLYTIGYTGVGTQLFDSETELPPETTERPNYESYSHRLSNIRLIIGNTLRAPVYSWTHRSADRTNTIATNIITQIPAVKGNFLFNGSVISGPGFTGGDLVRLNNSGNNIQNRGYIEVPIQFISTSTRYRVRVRYASVTPIRLSVNWGNSNIFSSIVPATATSLDNLQSRNFGYFESRNAFTSATGNVVGVRNFSENAGVIIDRFEFIPVTATFEAEYDLERAQE

SEQ ID NO: 82 - DNA, 1965 bp, Artificial Sequence
  encodes Cry1B variant
atgccgagcaatcgtaagaatgaaaatgaaatcattaacgcactgtccatccctgcagtgagcaatcacagcgcgcagatggatttgagcctggatgcgcgtatcgaggacagcctgtgtattgccgagggcaacaacatcaatccgttggtcagcgcgagcaccgtgcaaaccggcattaacattgccggtcgtatcctgggtgtcctgggcgttccgtttgcgggtcagctggcgagcttttacagctttatcgttggtgagttgtggccgtcgggtcgtgacccttgggagattttcatggagcacgtcgagcaactggtgcgccaagcgattacgctgaatgcgcgcaacaccgctctggcgcgtctgcaaggtctgggtgcaagcttccgcgcttaccagcagtccctggaagattggttggaaaaccgtgataatgcgcgcactcgctccgtcctgtacacgcagtacatcgcgctggagctggacttcttgaacgcgatgccgctgtttgcaatcaacaaccagcaagtgccgctgctgatggtctacgcccaagccgcgaatctgcacttgctgctgctgcgcgacgcatctctgttcggtagcgaatttggcctgaccagccaggagatccagcgctactatgagcgtcaggccgagaaaacgcgtgaatactccgactactgcgctcgttggtacaacacgggtctgaacaatctgcgtggcaccaacgcggagtcctggctgcgttacaaccagtttcgtcgcgatctgaccctgggtgttttggatttggttgcgctgtttccgagctatgacacccgcatctatccgatcaacaccagcgcgcaactgactcgtgaaatctatacggacccgattggccgcactaatgcaccgtccggtttcgcaagcaccaactggttcaataacaatgcaccgagcttcagcgcgatcgaggccgcgatctttcgtccgccgcacctgttggacttcccggagcagctgaccatctactctgcatctagccgttggagcagcacgcagcacatgaattactgggttggccatcgtctgtatttccgcccgattaacggtacgctgaacactagcacgcacggtgccactaacacgagcatcaacccggtgacgctgcaattcaccagccgtgatgtttaccgtaccgagtcctacgccggcatcaacattctgctgaccaccccggttaacggcgtcccttgggctcgtttcaattggcgtaacccactgaatagcctgcgtggttctttgctgtacaccattggttataccggcgtcggtacgcaactgtttgactcggaaactgagctgccaccggaaactaccgagcgtccgaactacgaatcttatagccaccgtctgtccaatatccgtctgatcatcggcaacaccctgcgtgcgccggtgtacagctggacccatcgtagcgccgatcgcacgaacacgattgccaccaacattatcacccagatcccggcagtgaaaggcaactttctgtttaacggcagcgtgatcagcggtccaggttttaccggcggtgacctggtgcgcctgaacaacagcggcaacaatatccaaaaccgtggttatatcgaagtcccgattcaattcatcagcacgagcacccgttaccgcgtccgtgttcgctacgcatccgttacgccgatccgcctgagcgttaactggggcaattccaacattttcagcagcattgtccctgctacggcgacctctctggacaatttgcagagccgtaacttcggctatttcgaaagccgcaacgctttcaccagcgctacgggcaatgtggttggtgttcgcaatttcagcgagaatgcgggcgtcatcattgaccgttttgagtttatcccggtgaccgcgaccttcgaagcggagtacgatctggagcgtgcgcaggaa

SEQ ID NO: 83 - protein, 655 aa, Artificial Sequence
  Cry1B variant
MPSNRKNENEIINALSIPAVSNHSAQMDLSLDARIEDSLCIAEGNNINPLVSASTVQTGINIAGRILGVLGVPFAGQLASFYSFIVGELWPSGRDPWEIFMEHVEQLVRQAITLNARNTALARLQGLGASFRAYQQSLEDWLENRDNARTRSVLYTQYIALELDFLNAMPLFAINNQQVPLLMVYAQAANLHLLLLRDASLFGSEFGLTSQEIQRYYERQAEKTREYSDYCARWYNTGLNNLRGTNAESWLRYNQFRRDLTLGVLDLVALFPSYDTRIYPINTSAQLTREIYTDPIGRTNAPSGFASTNWFNNNAPSFSAIEAAIFRPPHLLDFPEQLTIYSASSRWSSTQHMNYWVGHRLYFRPIQGTLNTSTHGATNTSINPVTLQFTSRDVYRTESYAGINILLTTPVNGVPWARFNWRNPLNSLRGSLLYTIGYTGVGTQLFDSETELPPETTERPNYESYSHRLSNIRLIIGNTLRAPVYSWTHRSADRTNTIATNIITQIPAVKGNFLFNGSVISGPGFTGGDLVRLNNSGNNIQNRGYIEVPIQFISTSTRYRVRVRYASVTPIRLSVNWGNSNIFSSIVPATATSLDNLQSRNFGYFESRNAFTSATGNVVGVRNFSENAGVIIDRFEFIPVTATFEAEYDLERAQE

SEQ ID NO: 84 - DNA, 1965 bp, Artificial Sequence
  encodes Cry1B variant
atgccgagcaatcgtaagaatgaaaatgaaatcattaacgcactgtccatccctgcagtgagcaatcacagcgcgcagatggatttgagcctggatgcgcgtatcgaggacagcctgtgtattgccgagggcaacaacatcaatccgttggtcagcgcgagcaccgtgcaaaccggcattaacattgccggtcgtatcctgggtgtcctgggcgttccgtttgcgggtcagctggcgagcttttacagctttatcgttggtgagttgtggccgtcgggtcgtgacccttgggagattttcatggagcacgtcgagcaactggtgcgccaagcgattacgctgaatgcgcgcaacaccgctctggcgcgtctgcaaggtctgggtgcaagcttccgcgcttaccagcagtccctggaagattggttggaaaaccgtgataatgcgcgcactcgctccgtcctgtacacgcagtacatcgcgctggagctggacttcttgaacgcgatgccgctgtttgcaatcaacaaccagcaagtgccgctgctgatggtctacgcccaagccgcgaatctgcacttgctgctgctgcgcgacgcatctctgttcggtagcgaatttggcctgaccagccaggagatccagcgctactatgagcgtcaggccgagaaaacgcgtgaatactccgactactgcgctcgttggtacaacacgggtctgaacaatctgcgtggcaccaacgcggagtcctggctgcgttacaaccagtttcgtcgcgatctgaccctgggtgttttggatttggttgcgctgtttccgagctatgacacccgcatctatccgatcaacaccagcgcgcaactgactcgtgaaatctatacggacccgattggccgcactaatgcaccgtccggtttcgcaagcaccaactggttcaataacaatgcaccgagcttcagcgcgatcgaggccgcgatctttcgtccgccgcacctgttggacttcccggagcagctgaccatctactctgcatctagccgttggagcagcacgcagcacatgaattactgggttggccatcgtctgtatttccgcccgattcagggtacgctgaacactagcacgcacggtgccactaacacgagcatcaacccggtgacgctgcaattcaccagccgtgatgtttaccgtaccgagtcctacgccggcatcaacattctgctgaccaccccggttaacggcgtcccttgggctcgtttcaattggcgtaacccactgaatagcctgcgtggttctttgctgtacaccattggttataccggcgtcggtacgcaactgtttgactcggaaactgagctgccaccggaaactaccgagcgtccgaactacgaatcttatagccaccgtctgtccaatatccgtctgatcatcggcaacaccctgcgtgcgccggtgtacagctggacccatcgtagcgccgatcgcacgaacacgattgccaccaacattatcacccagatcccggcagtgaaaggcaactttctgtttaacggcagcgtgatcagcggtccaggttttaccggcggtgacctggtgcgcctgaacaacagcggcaacaatatccaaaaccgtggttatatcgaagtcccgattcaattcatcagcacgagcacccgttaccgcgtccgtgttcgctacgcatccgttacgccgatccgcctgagcgttaactggggcaattccaacattttcagcagcattgtccctgctacggcgacctctctggacaatttgcagagccgtaacttcggctatttcgaaagccgcaacgctttcaccagcgctacgggcaatgtggttggtgttcgcaatttcagcgagaatgcgggcgtcatcattgaccgttttgagtttatcccggtgaccgcgaccttcgaagcggagtacgatctggagcgtgcgcaggaa

SEQ ID NO: 85 - protein, 663 aa, Artificial Sequence
  Cry1B variant
MPSNRKNENEIINAVSNHSAQMDLSLDARIEDSLCVAEVNNIDPFVSASTVQTGISIAGRILGVLGVPFAGQLASFYSFLVGELWPSGRDPWEIFMEHVEQIVRQQITDSVRDTAIARLEGLGRGYRSYQQALETWLDNRNDARSRSIIRERYIALELDITTAIPLFSIRNQEVPLLMVYAQAANLHLLLLRDASLFGSEWGMSSSDVNQYYQEQIRYTEEYSNHCVQWYNTGLNNLRGTNAESWLRYNQFRRDLTLGVLDLVALFPSYDTRVYPMNTSAQLTREIYTDPIGRTNAPSGFASTNWFNNNAPSFSAIEAAIFRPPHLLDFPEQLTIYSASSRWSSTQHMNYWVGHRLNFRPIGGTLNTSTQGLTNNTSINPVTLQFTSRDVYRTESNAGTNILFTTPVNGVPWARFNFINPQNIYERGATTYSQPYQGVGIQLFDSETELPPETTERPNYESYSHRLSHIGLIIGNTLRAPVYSWTHRSATLTNTIDPERINQIPLVKGFRVWGGTSVITGPGFTGGDILRRNTFGDFVSLQVNINSPITQRYRLRFRYASSRDARVIVLTGAASTGVGGQVSVNMPLQKTMEIGENLTSRTFRYTDFSNPFSFRANPDIIGISEQPLFGAGSISSGELYIDKIEIILADATFEAESDLERAQK

SEQ ID NO: 86 - DNA, 1989 bp, Artificial Sequence
  encodes Cry1B variant
atgccttcaaataggaaaaatgagaatgaaattataaatgctgtatcgaatcattccgcacaaatggatctatcgctagatgctcgtattgaagatagcttgtgtgtagccgaggtgaacaatattgatccatttgttagcgcatcaacagtccaaacaggtattagtatagctggtagaatattgggcgtattaggtgtgccgtttgctggacaactagctagtttttatagttttcttgttggggaattatggcctagcggcagagatccatgggaaatttttatggaacatgtcgagcaaattgtaagacaacaaataacggacagtgttagggataccgctattgctcgtttagaaggtctaggaagagggtatagatcttaccagcaggctcttgaaacttggttagataaccgaaatgatgcaagatcaagaagcattattcgtgagagatatattgctttagaacttgacattactactgctataccgcttttcagcatacgaaatcaagaggttccattattaatggtatatgctcaagctgcaaatttacacctattattattgagagacgcatccctttttggtagtgaatgggggatgtcatcttccgatgttaaccaatattaccaagaacaaatcagatatacagaggaatattctaaccattgcgtacaatggtataatacagggctaaataacttaagagggacaaatgctgaaagttggttgcggtataatcaattccgtagagatctaacgttaggagtattagatctagtggcactattcccaagctatgacacgcgtgtttatccaatgaatacgagtgctcagttaacaagagaaatttatacagatccaattgggagaacaaatgcaccttcaggatttgcaagtacgaattggtttaataataatgcaccatcgttttctgccatagaggctgccattttcaggcctccgcatctacttgattttccagaacaacttacaatttacagtgcatcaagccgttggagtagcactcaacatatgaattattgggtgggacataggcttaacttccgcccaataggagggacattaaatacctcaacacaaggacttactaataatacttcaattaatcctgtaacattacagtttacgtctcgtgacgtttatagaacagaatcaaatgcagggacaaatatactatttactactcctgtgaatggagtaccttgggctagatttaattttataaaccctcagaatatttatgaaagaggcgccactacctacagtcaaccgtatcagggagttgggattcaattatttgattcagaaactgaattaccaccagaaacaacagaacgaccaaattatgaatcatatagtcatagattatctcatataggactaatcataggaaacactttgagagcaccagtctattcttggacgcatcgtagtgcaactcttacaaatacaattgatccagagagaattaatcaaatacctttagtgaaaggatttagagtttgggggggcacctctgtcattacaggaccaggatttacaggaggggatatccttcgaagaaatacctttggtgattttgtatctctacaagtcaatattaattcaccaattacccaaagataccgtttaagatttcgttacgcttccagtagggatgcacgagttatagtattaacaggagcggcatccacaggagtgggaggccaagttagtgtaaatatgcctcttcagaaaactatggaaataggggagaacttaacatctagaacatttagatataccgattttagtaatcctttttcatttagagctaatccagatataattgggataagtgaacaacctctatttggtgcaggttctattagtagcggtgaactttatatagataaaattgaaattattctagcagatgcaacatttgaagcagaatctgatttagaaagagcacaaaag

SEQ ID NO: 87 - protein, 663 aa, Artificial Sequence
  Cry1B variant
MPSNRKNENEIINAVSNHSAQMDLSLDARIEDSLCVAEVNNIDPFVSASTVQTGISIAGRILGVLGVPFAGQLASFYSFLVGELWPSGRDPWEIFMEHVEQIVRQQITDSVRDTAIARLEGLGRGYRSYQQALETWLDNRNDARSRSIIRERYIALELDITTAIPLFSIRNQEVPLLMVYAQAANLHLLLLRDASLFGSEWGMSSSDVNQYYQEQIRYTEEYSNHCVQWYNTGLNNLRGTNAESWLRYNQFRRDLTLGVLDLVALFPSYDTRTYPINTSAQLTREIYTDPIGRTNAPSGFASTNWFNNNAPSFSAIEAAIFRPPHLLDFPEQLTIYSASSRWSSTQHMNYWVGHRLNFRPIGGTLNTSTQGLTNNTSINPVTLQFTSRDVYRTESNAGTNILFTTPVNGVPWARFNFINPQNIYERGATTYSQPYQGVGIQLFDSETELPPETTERPNYESYSHRLSHIGLIIGNTLRAPVYSWTHRSATLTNTIDPERINQIPLVKGFRVWGGTSVITGPGFTGGDILRRNTFGDFVSLQVNINSPITQRYRLRFRYASSRDARVIVLTGAASTGVGGQVSVNMPLQKTMEIGENLTSRTFRYTDFSNPFSFRANPDIIGISEQPLFGAGSISSGELYIDKIEIILADATFEAESDLEGARK

SEQ ID NO: 88 - DNA, 1989 bp, Artificial Sequence
  encodes Cry1B variant
atgccttcaaataggaaaaatgagaatgaaattataaatgctgtatcgaatcattccgcacaaatggatctatcgctagatgctcgtattgaagatagcttgtgtgtagccgaggtgaacaatattgatccatttgttagcgcatcaacagtccaaacaggtattagtatagctggtagaatattgggcgtattaggtgtgccgtttgctggacaactagctagtttttatagttttcttgttggggaattatggcctagcggcagagatccatgggaaatttttatggaacatgtcgagcaaattgtaagacaacaaataacggacagtgttagggataccgctattgctcgtttagaaggtctaggaagagggtatagatcttaccagcaggctcttgaaacttggttagataaccgaaatgatgcaagatcaagaagcattattcgtgagagatatattgctttagaacttgacattactactgctataccgcttttcagcatacgaaatcaagaggttccattattaatggtatatgctcaagctgcaaatttacacctattattattgagagacgcatccctttttggtagtgaatgggggatgtcatcttccgatgttaaccaatattaccaagaacaaatcagatatacagaggaatattctaaccattgcgtacaatggtataatacagggctaaataacttaagagggacaaatgctgaaagttggttgcggtataatcaattccgtagagatctaacgttaggagtattagatctagtggcactattcccaagctatgacactcgcacttatccaatcaatacgagtgctcagttaacaagagaaatttatacagatccaattgggagaacaaatgcaccttcaggatttgcaagtacgaattggtttaataataatgcaccatcgttttctgccatagaggctgccattttcaggcctccgcatctacttgattttccagaacaacttacaatttacagtgcatcaagccgttggagtagcactcaacatatgaattattgggtgggacataggcttaacttccgcccaataggagggacattaaatacctcaacacaaggacttactaataatacttcaattaatcctgtaacattacagtttacgtctcgtgacgtttatagaacagaatcaaatgcagggacaaatatactatttactactcctgtgaatggagtaccttgggctagatttaattttataaaccctcagaatatttatgaaagaggcgccactacctacagtcaaccgtatcagggagttgggattcaattatttgattcagaaactgaattaccaccagaaacaacagaacgaccaaattatgaatcatatagtcatagattatctcatataggactaatcataggaaacactttgagagcaccagtctattcttggacgcatcgtagtgcaactcttacaaatacaattgatccagagagaattaatcaaatacctttagtgaaaggatttagagtttgggggggcacctctgtcattacaggaccaggatttacaggaggggatatccttcgaagaaatacctttggtgattttgtatctctacaagtcaatattaattcaccaattacccaaagataccgtttaagatttcgttacgcttccagtagggatgcacgagttatagtattaacaggagcggcatccacaggagtgggaggccaagttagtgtaaatatgcctcttcagaaaactatggaaataggggagaacttaacatctagaacatttagatataccgattttagtaatcctttttcatttagagctaatccagatataattgggataagtgaacaacctctatttggtgcaggttctattagtagcggtgaactttatatagataaaattgaaattattctagcagatgcaacatttgaagcagaatctgatttagaaggggcgcggaag

SEQ ID NO: 89 - protein, 663 aa, Artificial Sequence
  Cry1B variant
MPSNRKNENEIINAVSNHSAQMDLSLDARIEDSLCVAEVNNIDPFVSASTVQTGINIAGRILGVLGVPFAGQLASFYSFLVGELWPSGRDPWEIFMEHVEQIVRQQITDSVRDTAIARLEGLGRGYRSYQQALETWLDNRNDARSRSIILERYIALELDITTAIPLFSIRNQEVPLLMVYAQAANLHLLLLRDASLFGSEWGMASSDVNQYYQEQIRYTEEYSNHCVQWYNTGLNNLRGTNAESWLRYNQFRRDLTLGVLDLVALFPSYDTRTYPINTSAQLTREIYTDPIGRTNAPSGFASTNWFNNNAPSFSAIEAAIFRPPHLLDFPEQLTIYSASSRWSSTQHMNYWVGHRLNFRPIGGTLNTSTQGLTNNTSINPVTLQFTSRDVYRTESNAGTNILFTTPVNGVPWARFNFINPQNIYERGATTYSQPYQGVGIQLFDSETELPPETTERPNYESYSHRLSHIGLIIGNTLRAPVYSWTHRSATLTNTIDPERINQIPLVKGFRVWGGTSVITGPGFTGGDILRRNTFGDFVSLQVNINSPITQRYRLRFRYASSRDARVIVLTGAASTGVGGQVSVNMPLQKTMEIGENLTSRTFRYTDFSNPFSFRANPDIIGISEQPLFGAGSISSGELYIDKIEIILADATFEAESDLEKAQK

SEQ ID NO: 90 - DNA, 1989 bp, Artificial Sequence
  encodes Cry1B variant
atgccttcaaataggaaaaatgagaatgaaattataaatgctgtatcgaatcattccgcacaaatggatctatcgctagatgctcgtattgaagatagcttgtgtgtagccgaggtgaacaatattgatccatttgttagcgcatcaacagtccaaacgggtattaacatagctggtagaatactaggcgtattaggggtgccgtttgctggacaactagctagtttttatagttttcttgttggggaattatggcctagcggcagagatccatgggaaatttttatggaacatgtcgagcaaattgtaagacaacaaataacggacagtgttagggataccgctattgctcgtttagaaggtctaggaagagggtatagatcttaccagcaggctcttgaaacttggttagataaccgaaatgatgcaagatcaagaagcattattcttgagcgctatattgctttagaacttgacattactactgctataccgcttttcagcatacgaaatcaagaggttccattattgatggtatatgctcaagctgcaaatttacacctattattattgagagacgcatccctttttggtagtgaatgggggatggcatcttccgatgttaaccaatattaccaagaacaaatcagatatacagaggaatattctaaccattgcgtacaatggtataatacagggctaaataacttaagagggacaaatgctgaaagttggttgcggtataatcaattccgtagagacctaacgttaggggtattagatttagtagccctattcccaagctatgatactcgcacttatccaatcaatacgagtgctcagttaacaagagaaatttatacagatccaattgggagaacaaatgcaccttcaggatttgcaagtacgaattggtttaataataatgcaccatcgttttctgccatagaggctgccattttcaggcctccgcatctacttgattttccagaacaacttacaatttacagtgcatcaagccgttggagtagcactcaacatatgaattattgggtgggacataggcttaacttccgcccaataggagggacattaaatacctcaacacaaggacttactaataatacttcaattaatcctgtaacattacagtttacgtctcgtgacgtttatagaacagaatcaaatgcagggacaaatatactatttactactcctgtgaatggagtaccttgggctagatttaattttataaaccctcagaatatttatgaaagaggcgccactacctacagtcaaccgtatcagggagttgggattcaattatttgattcagaaactgaattaccaccagaaacaacagaacgaccaaattatgaatcatatagtcatagattatctcatataggactaatcataggaaacactttgagagcaccagtctattcttggacgcatcgtagtgcaactcttacaaatacaattgatccagagagaattaatcaaatacctttagtgaaaggatttagagtttgggggggcacctctgtcattacaggaccaggatttacaggaggggatatccttcgaagaaatacctttggtgattttgtatctctacaagtcaatattaattcaccaattacccaaagataccgtttaagatttcgttacgcttccagtagggatgcacgagttatagtattaacaggagcggcatccacaggagtgggaggccaagttagtgtaaatatgcctcttcagaaaactatggaaataggggagaacttaacatctagaacatttagatataccgattttagtaatcctttttcatttagagctaatccagatataattgggataagtgaacaacctctatttggtgcaggttctattagtagcggtgaactttatatagataaaattgaaattattctagcagatgcaacatttgaagcagaatctgatttagagaaagctcagaaa

SEQ ID NO: 91 - protein, 663 aa, Artificial Sequence
  Cry1B variant
MPSNRKNENEIINAVSNHSAQMDLSLDARIEDSLCVAEVNNIDPFVSASTVQTGISIAGRILGVLGVPFAGQLASFYSFLVGELWPSGRDPWEIFLEHVEQLIRQQVTENTRNTAIARLEGLGRGYRSYQQALETWLDNRNDARSRSIILERYVALELDITTAIPLFSIRNQEVPLLMVYAQAANLHLLLLRDASLFGSEWGMSSADVNQYYQEQIRYTEEYSNHCVQWYNTGLNNLRGTNAESWLRYNQFRRDLTLGVLDLVALFPSYDTRTYPINTSAQLTREIYTDPIGRTNAPSGFASTNWFNNNAPSFSAIEAAIFRPPHLLDFPEQLTIYSASSRWSSTQHMNYWVGHRLNFRPIGGTLNTSTQGLTNNTSINPVTLQFTSRDVYRTESNAGTNILFTTPVNGVPWARFNFINPQNIYERGATTYSQPYQGVGIQLFDSETELPPETTERPNYESYSHRLSHIGLIIGNTLRAPVYSWTHRSATLTNTIDPERINQIPLVKGFRVWGGTSVITGPGFTGGDILRRNTFGDFVSLQVNINSPITQRYRLRFRYASSRDARVIVLTGAASTGVGGQVSVNMPLQKTMEIGENLTSRTFRYTDFSNPFSFRANPDIIGISEQPLFGAGSISSGELYIDKIEIILADATFEAESDLERAQK

SEQ ID NO: 92 - DNA, 1989 bp, Artificial Sequence
  encodes Cry1B variant
atgccttcaaataggaaaaatgagaatgaaattataaatgctgtatcgaatcattccgcacaaatggatctatcgctagatgctcgtattgaagatagcttgtgtgtagccgaggtgaacaatattgatccatttgttagcgcatcaacagtccaaacaggtattagtatagctggtagaatattgggcgtattaggtgtgccgtttgctggacaactagctagtttttatagttttcttgttggggaattatggcctagcggcagagatccatgggaaattttcctggaacatgtcgaacaacttataagacaacaagtaacagaaaatactaggaatacggctattgctcgattagaaggtctaggaagaggctatagatcttaccagcaggctcttgaaacttggttagataaccgaaatgatgcaagatcaagaagcattattcttgagcgctatgttgctttagaacttgacattactactgctataccgcttttcagcatacgaaatcaagaggttccattattaatggtatatgctcaagctgcaaatttacacctattattattgagagacgcatccctttttggtagtgaatgggggatgtcatctgccgatgttaaccaatattaccaagaacaaatcagatatacagaggaatattctaaccattgcgtacaatggtataatacagggctaaataacttaagagggacaaatgctgaaagttggttgcggtataatcaattccgtagagacctaacgttaggggtattagatttagtagccctattcccaagctatgacactcgcacttatccaatcaatacgagtgctcagttaacaagagaaatttatacagatccaattgggagaacaaatgcaccttcaggatttgcaagtacgaattggtttaataataatgcaccatcgttttctgccatagaggctgccattttcaggcctccgcatctacttgattttccagaacaacttacaatttacagtgcatcaagccgttggagtagcactcaacatatgaattattgggtgggacataggcttaacttccgcccaataggagggacattaaatacctcaacacaaggacttactaataatacttcaattaatcctgtaacattacagtttacgtctcgtgacgtttatagaacagaatcaaatgcagggacaaatatactatttactactcctgtgaatggagtaccttgggctagatttaattttataaaccctcagaatatttatgaaagaggcgccactacctacagtcaaccgtatcagggagttgggattcaattatttgattcagaaactgaattaccaccagaaacaacagaacgaccaaattatgaatcatatagtcatagattatctcatataggactaatcataggaaacactttgagagcaccagtctattcttggacgcatcgtagtgcaactcttacaaatacaattgatccagagagaattaatcaaatacctttagtgaaaggatttagagtttgggggggcacctctgtcattacaggaccaggatttacaggaggggatatccttcgaagaaatacctttggtgattttgtatctctacaagtcaatattaattcaccaattacccaaagataccgtttaagatttcgttacgcttccagtagggatgcacgagttatagtattaacaggagcggcatccacaggagtgggaggccaagttagtgtaaatatgcctcttcagaaaactatggaaataggggagaacttaacatctagaacatttagatataccgattttagtaatcctttttcatttagagctaatccagatataattgggataagtgaacaacctctatttggtgcaggttctattagtagcggtgaactttatatagataaaattgaaattattctagcagatgcaacatttgaagcagaatctgatttagaaagagcacaaaag

SEQ ID NO: 93 - protein, 655 aa, Artificial Sequence
  Cry1B variant
MPSNRKNENEIINALSIPAVSNHSAQMDLSLDARIEDSLCIAEGNNINPLVSASTVQTGINIAGRILGVLGVPFAGQLASFYSFIVGELWPSGRDPWEIFMEHVEQLVRQHITENARNTALARLQGLGASFRAYQQSLEDWLENRDNARTRSVLYTQYIALELDFLNAMPLFAINNQQVPLLMVYAQAANLHLLLLRDASLFGSEFGLTSQEIQRYYERQAEKTREYSDYCARWYNTGLNNLRGTNAESWLRYNQFRRDLTLGVLDLVALFPSYDTRIYPINTSAQLTREIYTDPIGRTNAPSGFASTNWFNNNAPSFSAIEAAIFRPPHLLDFPEQLTIYSASSRWSSTQHMNYWVGHRLNFRPIHGTLNTSTHGATNTSINPVTLQFTSRDVYRTESYAGINILLTTPVNGVPWARFNWRNPLNSLRGSLLYTIGYTGVGTQLFDSETELPPETTERPNYESYSHRLSNIRLIISNTLRAPVYSWTHRSADRTNTIATNIITQIPAVKGNFLFNGSVISGPGFTGGDLVRLNNSGNNIYNRGYIEVPIQFISTSTRYRVRVRYASVTPIRLSVNWGNSNIFSSIVPATATSLDNLQSRNFGYFESRNAFTSATGNVVGVRNFSENAGVIIDRFEFIPVTATFEAEYDLERAQE

SEQ ID NO: 94 - DNA, 1968 bp, Artificial Sequence
  encodes Cry1B variant
atgccctccaaccgcaagaacgagaacgagataatcaacgccctgtcgatcccagccgtctccaaccactccgcgcagatggacctctcactggacgctcgcatcgaggactcactctgcatcgccgagggcaacaacatcaacccgctcgtcagcgcctcgaccgtgcagactggcatcaacatcgccggtcgcatactcggcgtcctcggagtcccattcgcaggtcagctggcgagcttctacagcttcatcgtcggcgagctctggccatcaggtcgcgatccctgggagatcttcatggagcacgtcgagcagctggtcaggcagcacatcacggagaacgctcgcaacacggctctcgccagactccaaggcctcggagccagcttcagagcctaccagcagtccctcgaggactggctcgagaaccgcgacaacgcgaggacccggagcgtcctctacacccagtacatcgcgctggagctcgacttcctgaacgcgatgccactcttcgccatcaacaaccagcaggtgccgctcctcatggtctacgcccaagctgccaacctccacctcctgctcctcagagacgctagcctgttcggcagcgagttcggactcacgtcgcaggagatccagcgctactacgagcgccaggcggagaagacccgggagtacagcgactactgcgcacgctggtacaacaccggcctgaacaacctgcgcggcacgaacgctgagagctggctccgctacaaccagttccgcagggacctcacactcggagtcctcgacctcgtcgcgctgttcccgagctacgacacgcggatctacccgatcaacacgagcgcgcagctcactcgcgagatctacacggaccccatcggtcgcacgaacgctccatccggcttcgcctccaccaactggttcaacaacaacgcgccgtcgttcagcgccatcgaagctgcaatcttccgcccacctcacctgctggacttcccagagcagctcaccatctacagcgcctccagccgctggtccagcacgcagcacatgaactactgggtcggccaccgcctcaacttcaggcctatccacggtaccctcaacacctcgacccacggcgccacgaacacgtccatcaacccggtgacgctccagttcacgagccgggacgtctaccgcactgagagctacgctggcatcaacatcctgctcacgacgccagtgaacggcgtcccgtgggcacgcttcaactggaggaaccctctcaactccctgcgcggatcgctcctctacaccatcggctacaccggagtcggtacccagctcttcgacagcgagaccgagctcccacctgagaccaccgagaggcccaactacgagagctactcccaccgcctgtcgaacatccgcctcatcatctccaacacgctcagagctcccgtctactcctggacgcacaggtcagctgaccggacgaacaccatcgcgacgaacatcatcacccagatcccggccgtcaagggcaacttcctcttcaacggctccgtcatctccggaccaggcttcaccggaggagacctcgtccgcctcaacaactccggcaacaacatctacaaccggggctacatcgaggtgccgatccagttcatctccacgagcactcggtaccgcgtcagagtgcgctacgcgagcgtcactccgatccgcctctccgtcaactggggcaactcgaacatcttcagctccatcgtcccagccaccgcgactagcctcgacaacctgcagtcccgcaacttcggctacttcgagagccgcaacgccttcacgagcgcgactggcaacgtcgtcggcgtccgcaacttctccgagaacgccggagtgatcatcgaccgcttcgagttcatccccgtgaccgcgaccttcgaggccgagtacgaccttgagagagctcaggaggcc

SEQ ID NO: 95 - protein, 655 aa, Artificial Sequence
  Cry1B variant
MPSNRKNENEIINALSIPAVSNHSAQMDLSLDARIEDSLCIAEGNNINPLVSASTVQTGINIAGRILGVLGVPFAGQLASFYSFIVGELWPSGRDPWEIFMEHVEQLVRQHITENARNTALARLQGLGASFRAYQQSLEDWLENRDNARTRSVLYTQYIALELDFLNAMPLFAINNQQVPLLMVYAQAANLHLLLLRDASLFGSEFGLTSQEIQRYYERQAEKTREYSDYCARWYNTGLNNLRGTNAESWLRYNQFRRDLTLGVLDLVALFPSYDTRIYPINTSAQLTREIYTDPIGRTNAPSGFASTNWFNNNAPSFSAIEAAIFRPPHLLDFPEQLTIYSASSRWSSTQHMNYWVGHRLNFRPIHGTLNTSTHGATNTSINPVTLQFTSRDVYRTESYAGINILLTTPVNGVPWARFNWRNPLNSLRGSLLYTIGYTGVGTQLFDSETELPPETTERPNYESYSHRLSNIRLIIGNTLRAPVYSWTHRSADRTNTIATNIITQIPAVKGNFLFNGSVISGPGFTGGDLVRLNNSGNNIYNRGYIEVPIQFISTSTRYRVRVRYASVTPIRLSVNWGNSNIFSTIVPATATSLDNLQSRNFGYFESRNAFTSATGNVVGVRNFSENAGVIIDRFEFIPVTATFEAEYDLERAQE

SEQ ID NO: 96 - DNA, 1968 bp, Artificial Sequence
  encodes Cry1B variant
atgccctccaaccgcaagaacgagaacgagataatcaacgccctgtcgatcccagccgtctccaaccactccgcgcagatggacctctcactggacgctcgcatcgaggactcactctgcatcgccgagggcaacaacatcaacccgctcgtcagcgcctcgaccgtgcagactggcatcaacatcgccggtcgcatactcggcgtcctcggagtcccattcgcaggtcagctggcgagcttctacagcttcatcgtcggcgagctctggccatcaggtcgcgatccctgggagatcttcatggagcacgtcgagcagctggtcaggcagcacatcacggagaacgctcgcaacacggctctcgccagactccaaggcctcggagccagcttcagagcctaccagcagtccctcgaggactggctcgagaaccgcgacaacgcgaggacccggagcgtcctctacacccagtacatcgcgctggagctcgacttcctgaacgcgatgccactcttcgccatcaacaaccagcaggtgccgctcctcatggtctacgcccaagctgccaacctccacctcctgctcctcagagacgctagcctgttcggcagcgagttcggactcacgtcgcaggagatccagcgctactacgagcgccaggcggagaagacccgggagtacagcgactactgcgcacgctggtacaacaccggcctgaacaacctgcgcggcacgaacgctgagagctggctccgctacaaccagttccgcagggacctcacactcggagtcctcgacctcgtcgcgctgttcccgagctacgacacgcggatctacccgatcaacacgagcgcgcagctcactcgcgagatctacacggaccccatcggtcgcacgaacgctccatccggcttcgcctccaccaactggttcaacaacaacgcgccgtcgttcagcgccatcgaagctgcaatcttccgcccacctcacctgctggacttcccagagcagctcaccatctacagcgcctccagccgctggtccagcacgcagcacatgaactactgggtcggccaccgcctcaacttcaggcctatccacggtaccctcaacacctcgacccacggcgccacgaacacgtccatcaacccggtgacgctccagttcacgagccgggacgtctaccgcactgagagctacgctggcatcaacatcctgctcacgacgccagtgaacggcgtcccgtgggcacgcttcaactggaggaaccctctcaactccctgcgcggatcgctcctctacaccatcggctacaccggagtcggtacccagctcttcgacagcgagaccgagctcccacctgagaccaccgagaggcccaactacgagagctactcccaccgcctgtcgaacatccgcctcatcatcggcaacacgctcagagctcccgtctactcctggacgcacaggtcagctgaccggacgaacaccatcgcgacgaacatcatcacccagatcccggccgtcaagggcaacttcctcttcaacggctccgtcatctccggaccaggcttcaccggaggagacctcgtccgcctcaacaactccggcaacaacatctacaaccggggctacatcgaggtgccgatccagttcatctccacgagcactcggtaccgcgtcagagtgcgctacgcgagcgtcactccgatccgcctctccgtcaactggggcaactcgaacatcttcagcaccatcgtcccagccaccgcgactagcctcgacaacctgcagtcccgcaacttcggctacttcgagagccgcaacgccttcacgagcgcgactggcaacgtcgtcggcgtccgcaacttctccgagaacgccggagtgatcatcgaccgcttcgagttcatccccgtgaccgcgaccttcgaggccgagtacgaccttgagagagctcaggaggcc

SEQ ID NO: 97 - protein, 655 aa, Artificial Sequence
  Cry1B variant
MPSNRKNENEIINALSIPAVSNHSAQMDLSLDARIEDSLCIAEGNNINPLVSASTVQTGINIAGRILGVLGVPFAGQLASFYSFIVGELWPSGRDPWEIFMEHVEQLVRQMITLNARNTALARLQGLGASFRAYQQSLEDWLENRDNARTRSVLYTQYIALELDFLNAMPLFAINNQQVPLLMVYAQAANLHLLLLRDASLFGSEFGLTSQEIQRYYERQAEKTREYSDYCARWYNTGLNNLRGTNAESWLRYNQFRRDLTLGVLDLVALFPSYDTRIYPINTSAQLTREIYTDPIGRTNAPSGFASTNWFNNNAPSFSAIEAAIFRPPHLLDFPEQLTIYSASSRWSSTQHMNYWVGHRLNFRPIGGTLNTSTHGATNTSINPVTLQFTSRDVYRTESYAGINILLTTPVNGVPWARFNWRNPLNSLRGSLLYTIGYTGVGTQLFDSETELPPETTERPNYESYSHRLSNIRLIIGGTLRAPVYSWTHRSADRTNTIATNIITQIPAVKGNFLFNGSVISGPGFTGGDLVRLNNSGNNIQNRGYIEVPIQFISTSTRYRVRVRYASVTPIRLSVNWGNSNIFSSIVPATATSLDNLQSRNFGYFESRNAFTSATGNVVGVRNFSENAGVIIDRFEFIPVTATFEAEYDLERAQE

SEQ ID NO: 98 - DNA, 1968 bp, Artificial Sequence
  encodes Cry1B variant
atgccctccaaccgcaagaacgagaacgagataatcaacgccctgtcgatcccagccgtctccaaccactccgcgcagatggacctctcactggacgctcgcatcgaggactcactctgcatcgccgagggcaacaacatcaacccgctcgtcagcgcctcgaccgtgcagactggcatcaacatcgccggtcgcatactcggcgtcctcggagtcccattcgcaggtcagctggcgagcttctacagcttcatcgtcggcgagctctggccatcaggtcgcgatccctgggagatcttcatggagcacgtcgagcagctggtcaggcagatgatcacgctcaacgctcgcaacacggctctcgccagactccaaggcctcggagccagcttcagagcctaccagcagtccctcgaggactggctcgagaaccgcgacaacgcgaggacccggagcgtcctctacacccagtacatcgcgctggagctcgacttcctgaacgcgatgccactcttcgccatcaacaaccagcaggtgccgctcctcatggtctacgcccaagctgccaacctccacctcctgctcctcagagacgctagcctgttcggcagcgagttcggactcacgtcgcaggagatccagcgctactacgagcgccaggcggagaagacccgggagtacagcgactactgcgcacgctggtacaacaccggcctgaacaacctgcgcggcacgaacgctgagagctggctccgctacaaccagttccgcagggacctcacactcggagtcctcgacctcgtcgcgctgttcccgagctacgacacgcggatctacccgatcaacacgagcgcgcagctcactcgcgagatctacacggaccccatcggtcgcacgaacgctccatccggcttcgcctccaccaactggttcaacaacaacgcgccgtcgttcagcgccatcgaagctgcaatcttccgcccacctcacctgctggacttcccagagcagctcaccatctacagcgcctccagccgctggtccagcacgcagcacatgaactactgggtcggccaccgcctcaacttcaggcctatcggcggtaccctcaacacctcgacccacggcgccacgaacacgtccatcaacccggtgacgctccagttcacgagccgggacgtctaccgcactgagagctacgctggcatcaacatcctgctcacgacgccagtgaacggcgtcccgtgggcacgcttcaactggaggaaccctctcaactccctgcgcggatcgctcctctacaccatcggctacaccggagtcggtacccagctcttcgacagcgagaccgagctcccacctgagaccaccgagaggcccaactacgagagctactcccaccgcctgtcgaacatccgcctcatcatcggcggcacgctcagagctcccgtctactcctggacgcacaggtcagctgaccggacgaacaccatcgcgacgaacatcatcacccagatcccggccgtcaagggcaacttcctcttcaacggctccgtcatctccggaccaggcttcaccggaggagacctcgtccgcctcaacaactccggcaacaacatccagaaccggggctacatcgaggtgccgatccagttcatctccacgagcactcggtaccgcgtcagagtgcgctacgcgagcgtcactccgatccgcctctccgtcaactggggcaactcgaacatcttcagctccatcgtcccagccaccgcgactagcctcgacaacctgcagtcccgcaacttcggctacttcgagagccgcaacgccttcacgagcgcgactggcaacgtcgtcggcgtccgcaacttctccgagaacgccggagtgatcatcgaccgcttcgagttcatccccgtgaccgcgaccttcgaggccgagtacgaccttgagagagctcaggaggcc

SEQ ID NO: 99 - protein, 655 aa, Artificial Sequence
  Cry1B variant
MPSNRKNENEIINALSIPAVSNHSAQMDLSLDARIEDSLCIAEGNNINPLVSASTVQTGINIAGRILGVLGVPFAGQLASFYSFIVGELWPSGRDPWEIFMEHVEQLVRQMITMNARNTALARLQGLGASFRAYQQSLEDWLENRDNARTRSVLYTQYIALELDFLNAMPLFAINNQQVPLLMVYAQAANLHLLLLRDASLFGSEFGLTSQEIQRYYERQAEKTREYSDYCARWYNTGLNNLRGTNAESWLRYNQFRRDLTLGVLDLVALFPSYDTRIYPINTSAQLTREIYTDPIGRTNAPSGFASTNWFNNNAPSFSAIEAAIFRPPHLLDFPEQLTIYSASSRWSSTQHMNYWVGHRLNFRPIGGTLNTSTHGATNTSINPVTLQFTSRDVYRTESYAGINILLTTPVNGVPWARFNWRNPLNSLRGSLLYTIGYTGVGTQLFDSETELPPETTERPNYESYSHRLSNIRLIIGGTLRAPVYSWTHRSADRTNTIATNIITQIPAVKGNFLFNGSVISGPGFTGGDLVRLNNSGNNIQNRGYIEVPIQFISTSTRYRVRVRYASVTPIRLSVNWGNSNIFSSIVPATATSLDNLQSRNFGYFESRNAFTSATGNVVGVRNFSENAGVIIDRFEFIPVTATFEAEYDLERAQE

SEQ ID NO: 100 - DNA, 1968 bp, Artificial Sequence
  encodes Cry1B variant
atgccctccaaccgcaagaacgagaacgagataatcaacgccctgtcgatcccagccgtctccaaccactccgcgcagatggacctctcactggacgctcgcatcgaggactcactctgcatcgccgagggcaacaacatcaacccgctcgtcagcgcctcgaccgtgcagactggcatcaacatcgccggtcgcatactcggcgtcctcggagtcccattcgcaggtcagctggcgagcttctacagcttcatcgtcggcgagctctggccatcaggtcgcgatccctgggagatcttcatggagcacgtcgagcagctggtcaggcagatgatcacgatgaacgctcgcaacacggctctcgccagactccaaggcctcggagccagcttcagagcctaccagcagtccctcgaggactggctcgagaaccgcgacaacgcgaggacccggagcgtcctctacacccagtacatcgcgctggagctcgacttcctgaacgcgatgccactcttcgccatcaacaaccagcaggtgccgctcctcatggtctacgcccaagctgccaacctccacctcctgctcctcagagacgctagcctgttcggcagcgagttcggactcacgtcgcaggagatccagcgctactacgagcgccaggcggagaagacccgggagtacagcgactactgcgcacgctggtacaacaccggcctgaacaacctgcgcggcacgaacgctgagagctggctccgctacaaccagttccgcagggacctcacactcggagtcctcgacctcgtcgcgctgttcccgagctacgacacgcggatctacccgatcaacacgagcgcgcagctcactcgcgagatctacacggaccccatcggtcgcacgaacgctccatccggcttcgcctccaccaactggttcaacaacaacgcgccgtcgttcagcgccatcgaagctgcaatcttccgcccacctcacctgctggacttcccagagcagctcaccatctacagcgcctccagccgctggtccagcacgcagcacatgaactactgggtcggccaccgcctcaacttcaggcctatcggcggtaccctcaacacctcgacccacggcgccacgaacacgtccatcaacccggtgacgctccagttcacgagccgggacgtctaccgcactgagagctacgctggcatcaacatcctgctcacgacgccagtgaacggcgtcccgtgggcacgcttcaactggaggaaccctctcaactccctgcgcggatcgctcctctacaccatcggctacaccggagtcggtacccagctcttcgacagcgagaccgagctcccacctgagaccaccgagaggcccaactacgagagctactcccaccgcctgtcgaacatccgcctcatcatcggcggcacgctcagagctcccgtctactcctggacgcacaggtcagctgaccggacgaacaccatcgcgacgaacatcatcacccagatcccggccgtcaagggcaacttcctcttcaacggctccgtcatctccggaccaggcttcaccggaggagacctcgtccgcctcaacaactccggcaacaacatccagaaccggggctacatcgaggtgccgatccagttcatctccacgagcactcggtaccgcgtcagagtgcgctacgcgagcgtcactccgatccgcctctccgtcaactggggcaactcgaacatcttcagctccatcgtcccagccaccgcgactagcctcgacaacctgcagtcccgcaacttcggctacttcgagagccgcaacgccttcacgagcgcgactggcaacgtcgtcggcgtccgcaacttctccgagaacgccggagtgatcatcgaccgcttcgagttcatccccgtgaccgcgaccttcgaggccgagtacgaccttgagagagctcaggaggcc

SEQ ID NO: 101 - protein, 655 aa, Artificial Sequence
  Cry1B variant
MPSNRKNENEIINALSIPAVSNHSAQMDLSLDARIEDSLCIAEGNNINPLVSASTVQTGINIAGRILGVLGVPFAGQLASFYSFIVGELWPSGRDPWEIFMEHVEQLVRQMITHNARNTALARLQGLGASFRAYQQSLEDWLENRDNARTRSVLYTQYIALELDFLNAMPLFAINNQQVPLLMVYAQAANLHLLLLRDASLFGSEFGLTSQEIQRYYERQAEKTREYSDYCARWYNTGLNNLRGTNAESWLRYNQFRRDLTLGVLDLVALFPSYDTRIYPINTSAQLTREIYTDPIGRTNAPSGFASTNWFNNNAPSFSAIEAAIFRPPHLLDFPEQLTIYSASSRWSSTQHMNYWVGHRLNFRPIGGTLNTSTHGATNTSINPVTLQFTSRDVYRTESYAGINILLTTPVNGVPWARFNWRNPLNSLRGSLLYTIGYTGVGTQLFDSETELPPETTERPNYESYSHRLSNIRLIIGGTLRAPVYSWTHRSADRTNTIATNIITQIPAVKGNFLFNGSVISGPGFTGGDLVRLNNSGNNIQNRGYIEVPIQFISTSTRYRVRVRYASVTPIRLSVNWGNSNIFSSIVPATATSLDNLQSRNFGYFESRNAFTSATGNVVGVRNFSENAGVIIDRFEFIPVTATFEAEYDLERAQE

SEQ ID NO: 102 - DNA, 1968 bp, Artificial Sequence
  encodes Cry1B variant
atgccctccaaccgcaagaacgagaacgagataatcaacgccctgtcgatcccagccgtctccaaccactccgcgcagatggacctctcactggacgctcgcatcgaggactcactctgcatcgccgagggcaacaacatcaacccgctcgtcagcgcctcgaccgtgcagactggcatcaacatcgccggtcgcatactcggcgtcctcggagtcccattcgcaggtcagctggcgagcttctacagcttcatcgtcggcgagctctggccatcaggtcgcgatccctgggagatcttcatggagcacgtcgagcagctggtcaggcagatgatcacgcacaacgctcgcaacacggctctcgccagactccaaggcctcggagccagcttcagagcctaccagcagtccctcgaggactggctcgagaaccgcgacaacgcgaggacccggagcgtcctctacacccagtacatcgcgctggagctcgacttcctgaacgcgatgccactcttcgccatcaacaaccagcaggtgccgctcctcatggtctacgcccaagctgccaacctccacctcctgctcctcagagacgctagcctgttcggcagcgagttcggactcacgtcgcaggagatccagcgctactacgagcgccaggcggagaagacccgggagtacagcgactactgcgcacgctggtacaacaccggcctgaacaacctgcgcggcacgaacgctgagagctggctccgctacaaccagttccgcagggacctcacactcggagtcctcgacctcgtcgcgctgttcccgagctacgacacgcggatctacccgatcaacacgagcgcgcagctcactcgcgagatctacacggaccccatcggtcgcacgaacgctccatccggcttcgcctccaccaactggttcaacaacaacgcgccgtcgttcagcgccatcgaagctgcaatcttccgcccacctcacctgctggacttcccagagcagctcaccatctacagcgcctccagccgctggtccagcacgcagcacatgaactactgggtcggccaccgcctcaacttcaggcctatcggcggtaccctcaacacctcgacccacggcgccacgaacacgtccatcaacccggtgacgctccagttcacgagccgggacgtctaccgcactgagagctacgctggcatcaacatcctgctcacgacgccagtgaacggcgtcccgtgggcacgcttcaactggaggaaccctctcaactccctgcgcggatcgctcctctacaccatcggctacaccggagtcggtacccagctcttcgacagcgagaccgagctcccacctgagaccaccgagaggcccaactacgagagctactcccaccgcctgtcgaacatccgcctcatcatcggcggcacgctcagagctcccgtctactcctggacgcacaggtcagctgaccggacgaacaccatcgcgacgaacatcatcacccagatcccggccgtcaagggcaacttcctcttcaacggctccgtcatctccggaccaggcttcaccggaggagacctcgtccgcctcaacaactccggcaacaacatccagaaccggggctacatcgaggtgccgatccagttcatctccacgagcactcggtaccgcgtcagagtgcgctacgcgagcgtcactccgatccgcctctccgtcaactggggcaactcgaacatcttcagctccatcgtcccagccaccgcgactagcctcgacaacctgcagtcccgcaacttcggctacttcgagagccgcaacgccttcacgagcgcgactggcaacgtcgtcggcgtccgcaacttctccgagaacgccggagtgatcatcgaccgcttcgagttcatccccgtgaccgcgaccttcgaggccgagtacgaccttgagagagctcaggaggcc

SEQ ID NO: 103 - protein, 655 aa, Artificial Sequence
  Cry1B variant
MPSNRKNENEIINALSIPAVSNHSAQMDLSLDARIEDSLCIAEGNNINPLVSASTVQTGINIAGRILGVLGVPFAGQLASFYSFIVGELWPSGRDPWEIFMEHVEQLVRQHITMNARNTALARLQGLGASFRAYQQSLEDWLENRDNARTRSVLYTQYIALELDFLNAMPLFAINNQQVPLLMVYAQAANLHLLLLRDASLFGSEFGLTSQEIQRYYERQAEKTREYSDYCARWYNTGLNNLRGTNAESWLRYNQFRRDLTLGVLDLVALFPSYDTRIYPINTSAQLTREIYTDPIGRTNAPSGFASTNWFNNNAPSFSAIEAAIFRPPHLLDFPEQLTIYSASSRWSSTQHMNYWVGHRLNFRPIGGTLNTSTHGATNTSINPVTLQFTSRDVYRTESYAGINILLTTPVNGVPWARFNWRNPLNSLRGSLLYTIGYTGVGTQLFDSETELPPETTERPNYESYSHRLSNIRLIIGGTLRAPVYSWTHRSADRTNTIATNIITQIPAVKGNFLFNGSVISGPGFTGGDLVRLNNSGNNIQNRGYIEVPIQFISTSTRYRVRVRYASVTPIRLSVNWGNSNIFSSIVPATATSLDNLQSRNFGYFESRNAFTSATGNVVGVRNFSENAGVIIDRFEFIPVTATFEAEYDLERAQE

SEQ ID NO: 104 - DNA, 1968 bp, Artificial Sequence
  encodes Cry1B variant
atgccctccaaccgcaagaacgagaacgagataatcaacgccctgtcgatcccagccgtctccaaccactccgcgcagatggacctctcactggacgctcgcatcgaggactcactctgcatcgccgagggcaacaacatcaacccgctcgtcagcgcctcgaccgtgcagactggcatcaacatcgccggtcgcatactcggcgtcctcggagtcccattcgcaggtcagctggcgagcttctacagcttcatcgtcggcgagctctggccatcaggtcgcgatccctgggagatcttcatggagcacgtcgagcagctggtcaggcagcacatcacgatgaacgctcgcaacacggctctcgccagactccaaggcctcggagccagcttcagagcctaccagcagtccctcgaggactggctcgagaaccgcgacaacgcgaggacccggagcgtcctctacacccagtacatcgcgctggagctcgacttcctgaacgcgatgccactcttcgccatcaacaaccagcaggtgccgctcctcatggtctacgcccaagctgccaacctccacctcctgctcctcagagacgctagcctgttcggcagcgagttcggactcacgtcgcaggagatccagcgctactacgagcgccaggcggagaagacccgggagtacagcgactactgcgcacgctggtacaacaccggcctgaacaacctgcgcggcacgaacgctgagagctggctccgctacaaccagttccgcagggacctcacactcggagtcctcgacctcgtcgcgctgttcccgagctacgacacgcggatctacccgatcaacacgagcgcgcagctcactcgcgagatctacacggaccccatcggtcgcacgaacgctccatccggcttcgcctccaccaactggttcaacaacaacgcgccgtcgttcagcgccatcgaagctgcaatcttccgcccacctcacctgctggacttcccagagcagctcaccatctacagcgcctccagccgctggtccagcacgcagcacatgaactactgggtcggccaccgcctcaacttcaggcctatcggcggtaccctcaacacctcgacccacggcgccacgaacacgtccatcaacccggtgacgctccagttcacgagccgggacgtctaccgcactgagagctacgctggcatcaacatcctgctcacgacgccagtgaacggcgtcccgtgggcacgcttcaactggaggaaccctctcaactccctgcgcggatcgctcctctacaccatcggctacaccggagtcggtacccagctcttcgacagcgagaccgagctcccacctgagaccaccgagaggcccaactacgagagctactcccaccgcctgtcgaacatccgcctcatcatcggcggcacgctcagagctcccgtctactcctggacgcacaggtcagctgaccggacgaacaccatcgcgacgaacatcatcacccagatcccggccgtcaagggcaacttcctcttcaacggctccgtcatctccggaccaggcttcaccggaggagacctcgtccgcctcaacaactccggcaacaacatccagaaccggggctacatcgaggtgccgatccagttcatctccacgagcactcggtaccgcgtcagagtgcgctacgcgagcgtcactccgatccgcctctccgtcaactggggcaactcgaacatcttcagctccatcgtcccagccaccgcgactagcctcgacaacctgcagtcccgcaacttcggctacttcgagagccgcaacgccttcacgagcgcgactggcaacgtcgtcggcgtccgcaacttctccgagaacgccggagtgatcatcgaccgcttcgagttcatccccgtgaccgcgaccttcgaggccgagtacgaccttgagagagctcaggaggcc

SEQ ID NO: 105 - protein, 655 aa, Artificial Sequence
  Cry1B variant
MPSNRKNENEIINALSIPAVSNHSAQMDLSLDARIEDSLCIAEGNNINPLVSASTVQTGINIAGRILGVLGVPFAGQLASFYSFIVGELWPSGRDPWEIFMEHVEQLVRQMITHNARNTALARLQGLGASFRAYQQSLEDWLENRDNARTRSVLYTQYIALELDFLNAMPLFAINNQQVPLLMVYAQAANLHLLLLRDASLFGSEFGLTSQEIQRYYERQAEKTREYSDYCARWYNTGLNNLRGTNAESWLRYNQFRRDLTLGVLDLVALFPSYDTRIYPINTSAQLTREIYTDPIGRTNAPSGFASTNWFNNNAPSFSAIEAAIFRPPHLLDFPEQLTIYSASSRWSSTQHMNYWVGHRLNFRPINGTLNTSTHGATNTSINPVTLQFTSRDVYRTESYAGINILLTTPVNGVPWARFNWRNPLNSLRGSLLYTIGYTGVGTQLFDSETELPPETTERPNYESYSHRLSNIRLIIGNTLRAPVYSWTHRSADRTNTIATNIITQIPAVKGNFLFNGSVISGPGFTGGDLVRLNNSGNNIQNRGYIEVPIQFISTSTRYRVRVRYASVTPIRLSVNWGNSNIFSSIVPATATSLDNLQSRNFGYFESRNAFTSATGNVVGVRNFSENAGVIIDRFEFIPVTATFEAEYDLERAQE

SEQ ID NO: 106 - DNA, 1968 bp, Artificial Sequence
  encodes Cry1B variant
atgccctccaaccgcaagaacgagaacgagataatcaacgccctgtcgatcccagccgtctccaaccactccgcgcagatggacctctcactggacgctcgcatcgaggactcactctgcatcgccgagggcaacaacatcaacccgctcgtcagcgcctcgaccgtgcagactggcatcaacatcgccggtcgcatactcggcgtcctcggagtcccattcgcaggtcagctggcgagcttctacagcttcatcgtcggcgagctctggccatcaggtcgcgatccctgggagatcttcatggagcacgtcgagcagctggtcaggcagatgatcacgcacaacgctcgcaacacggctctcgccagactccaaggcctcggagccagcttcagagcctaccagcagtccctcgaggactggctcgagaaccgcgacaacgcgaggacccggagcgtcctctacacccagtacatcgcgctggagctcgacttcctgaacgcgatgccactcttcgccatcaacaaccagcaggtgccgctcctcatggtctacgcccaagctgccaacctccacctcctgctcctcagagacgctagcctgttcggcagcgagttcggactcacgtcgcaggagatccagcgctactacgagcgccaggcggagaagacccgggagtacagcgactactgcgcacgctggtacaacaccggcctgaacaacctgcgcggcacgaacgctgagagctggctccgctacaaccagttccgcagggacctcacactcggagtcctcgacctcgtcgcgctgttcccgagctacgacacgcggatctacccgatcaacacgagcgcgcagctcactcgcgagatctacacggaccccatcggtcgcacgaacgctccatccggcttcgcctccaccaactggttcaacaacaacgcgccgtcgttcagcgccatcgaagctgcaatcttccgcccacctcacctgctggacttcccagagcagctcaccatctacagcgcctccagccgctggtccagcacgcagcacatgaactactgggtcggccaccgcctcaacttcaggcctatcaacggtaccctcaacacctcgacccacggcgccacgaacacgtccatcaacccggtgacgctccagttcacgagccgggacgtctaccgcactgagagctacgctggcatcaacatcctgctcacgacgccagtgaacggcgtcccgtgggcacgcttcaactggaggaaccctctcaactccctgcgcggatcgctcctctacaccatcggctacaccggagtcggtacccagctcttcgacagcgagaccgagctcccacctgagaccaccgagaggcccaactacgagagctactcccaccgcctgtcgaacatccgcctcatcatcggcaacacgctcagagctcccgtctactcctggacgcacaggtcagctgaccggacgaacaccatcgcgacgaacatcatcacccagatcccggccgtcaagggcaacttcctcttcaacggctccgtcatctccggaccaggcttcaccggaggagacctcgtccgcctcaacaactccggcaacaacatccagaaccggggctacatcgaggtgccgatccagttcatctccacgagcactcggtaccgcgtcagagtgcgctacgcgagcgtcactccgatccgcctctccgtcaactggggcaactcgaacatcttcagctccatcgtcccagccaccgcgactagcctcgacaacctgcagtcccgcaacttcggctacttcgagagccgcaacgccttcacgagcgcgactggcaacgtcgtcggcgtccgcaacttctccgagaacgccggagtgatcatcgaccgcttcgagttcatccccgtgaccgcgaccttcgaggccgagtacgaccttgagagagctcaggaggcc

SEQ ID NO: 107 - protein, 655 aa, Artificial Sequence
  Cry1B variant
MPSNRKNENEIINALSIPAVSNHSAQMDLSLDARIEDSLCIAEGNNINPLVSASTVQTGINIAGRILGVLGVPFAGQLASFYSFIVGELWPSGRDPWEIFMEHVEQLVRQHITMNARNTALARLQGLGASFRAYQQSLEDWLENRDNARTRSVLYTQYIALELDFLNAMPLFAINNQQVPLLMVYAQAANLHLLLLRDASLFGSEFGLTSQEIQRYYERQAEKTREYSDYCARWYNTGLNNLRGTNAESWLRYNQFRRDLTLGVLDLVALFPSYDTRIYPINTSAQLTREIYTDPIGRTNAPSGFASTNWFNNNAPSFSAIEAAIFRPPHLLDFPEQLTIYSASSRWSSTQHMNYWVGHRLNFRPINGTLNTSTHGATNTSINPVTLQFTSRDVYRTESYAGINILLTTPVNGVPWARFNWRNPLNSLRGSLLYTIGYTGVGTQLFDSETELPPETTERPNYESYSHRLSNIRLIIGNTLRAPVYSWTHRSADRTNTIATNIITQIPAVKGNFLFNGSVISGPGFTGGDLVRLNNSGNNIQNRGYIEVPIQFISTSTRYRVRVRYASVTPIRLSVNWGNSNIFSSIVPATATSLDNLQSRNFGYFESRNAFTSATGNVVGVRNFSENAGVIIDRFEFIPVTATFEAEYDLERAQE

SEQ ID NO: 108 - DNA, 1968 bp, Artificial Sequence
  encodes Cry1B variant
atgccctccaaccgcaagaacgagaacgagataatcaacgccctgtcgatcccagccgtctccaaccactccgcgcagatggacctctcactggacgctcgcatcgaggactcactctgcatcgccgagggcaacaacatcaacccgctcgtcagcgcctcgaccgtgcagactggcatcaacatcgccggtcgcatactcggcgtcctcggagtcccattcgcaggtcagctggcgagcttctacagcttcatcgtcggcgagctctggccatcaggtcgcgatccctgggagatcttcatggagcacgtcgagcagctggtcaggcagcacatcacgatgaacgctcgcaacacggctctcgccagactccaaggcctcggagccagcttcagagcctaccagcagtccctcgaggactggctcgagaaccgcgacaacgcgaggacccggagcgtcctctacacccagtacatcgcgctggagctcgacttcctgaacgcgatgccactcttcgccatcaacaaccagcaggtgccgctcctcatggtctacgcccaagctgccaacctccacctcctgctcctcagagacgctagcctgttcggcagcgagttcggactcacgtcgcaggagatccagcgctactacgagcgccaggcggagaagacccgggagtacagcgactactgcgcacgctggtacaacaccggcctgaacaacctgcgcggcacgaacgctgagagctggctccgctacaaccagttccgcagggacctcacactcggagtcctcgacctcgtcgcgctgttcccgagctacgacacgcggatctacccgatcaacacgagcgcgcagctcactcgcgagatctacacggaccccatcggtcgcacgaacgctccatccggcttcgcctccaccaactggttcaacaacaacgcgccgtcgttcagcgccatcgaagctgcaatcttccgcccacctcacctgctggacttcccagagcagctcaccatctacagcgcctccagccgctggtccagcacgcagcacatgaactactgggtcggccaccgcctcaacttcaggcctatcaacggtaccctcaacacctcgacccacggcgccacgaacacgtccatcaacccggtgacgctccagttcacgagccgggacgtctaccgcactgagagctacgctggcatcaacatcctgctcacgacgccagtgaacggcgtcccgtgggcacgcttcaactggaggaaccctctcaactccctgcgcggatcgctcctctacaccatcggctacaccggagtcggtacccagctcttcgacagcgagaccgagctcccacctgagaccaccgagaggcccaactacgagagctactcccaccgcctgtcgaacatccgcctcatcatcggcaacacgctcagagctcccgtctactcctggacgcacaggtcagctgaccggacgaacaccatcgcgacgaacatcatcacccagatcccggccgtcaagggcaacttcctcttcaacggctccgtcatctccggaccaggcttcaccggaggagacctcgtccgcctcaacaactccggcaacaacatccagaaccggggctacatcgaggtgccgatccagttcatctccacgagcactcggtaccgcgtcagagtgcgctacgcgagcgtcactccgatccgcctctccgtcaactggggcaactcgaacatcttcagctccatcgtcccagccaccgcgactagcctcgacaacctgcagtcccgcaacttcggctacttcgagagccgcaacgccttcacgagcgcgactggcaacgtcgtcggcgtccgcaacttctccgagaacgccggagtgatcatcgaccgcttcgagttcatccccgtgaccgcgaccttcgaggccgagtacgaccttgagagagctcaggaggcc

SEQ ID NO: 109 - protein, 655 aa, Bacillus thuringiensis
MPSNRKNENEIINALSIPAVSNHSAQMDLSPDARIEDSLCIAEGNNINPLVSASTVQTGINIAGRILGVLGVPFAGQLASFYSFIVGELWPSGRDPWEIFLEHVEQLVRQQITENARNTALARLQGLGASFRAYQQSLEDWLENRDDARTRSVLYTQYIALELDFLNAMPLFAINNQQVPLLMVYAQAANLHLLLLRDASLFGSEFGLTSQEIQRYYERQAEKTREYSDYCARWYNTGLNNLRGTNAESWLRYNQFRRDLTLGVLDLVALFPSYDTRIYPINTSAQLTREIYTDPIGRTNAPSGFASTNWFNNNAPSFSAIEAAVIRPPHLLDFPEQLTIFSVLSRWSNTQYMNYWVGHRLESRTIRGSLSTSTHGNTNTSINPVTLQFTSRDVYRTESYAGINILLTTPVNGVPWARFNWRNPLNSLRGSLLYTIGYTGVGTQLFDSETELPPETTERPNYESYSHRLSNIRLISGNTLRAPVYSWTHRSADRTNTIATNIITQIPAVKGNFLFNGSVISGPGFTGGDLVRLNNSGNNIQNRGYLEVPIQFISTSTRYRVRVRYASVTPIQLSVNWGNSNIFSSIVPATATSLDNLQSRDFGYFESTNAFTSATGNVVGVRNFSENAGVIIDRFEFIPVTATFEAEYDLERAQE

SEQ ID NO: 110 - DNA, 1965 bp, Bacillus thuringiensis
atgccttcaaataggaaaaatgagaatgaaattataaatgctttatcgattccagctgtatcgaatcattccgcacaaatggatctatcaccagatgctcgtattgaggattctttgtgtatagccgaggggaataatatcaatccacttgttagcgcatcaacagtccaaacgggtattaacattgctggtagaatactaggcgtattaggcgtaccgtttgctggacaactagctagtttttatagttttattgtcggtgaattatggcctagcggcagagatccgtgggaaatctttctagaacatgttgaacaacttgtaagacaacaaataacagaaaatgctaggaatacggcacttgctcgattacaaggtttaggagcttcctttagagcctatcaacaatcacttgaagactggctagaaaaccgtgatgatgcaagaacgagaagtgttctttatacccaatatatagccttagagcttgattttcttaatgcgatgccgcttttcgcaataaacaatcaacaggttccattattgatggtatatgctcaagctgcaaatttacatctattattattgagagatgcctctctttttggtagtgaatttgggcttacatcgcaggaaattcaacgttattatgagcgccaagcggaaaaaacgagagaatattctgattattgcgcaagatggtataatacgggtttaaataatttgagagggacaaatgctgaaagttggttgcgatataatcaattccgtagagacttaacgctaggagtattagatctagtggcactattcccaagctatgacacgcgtatttatccaataaataccagtgctcaattaacaagagaaatttatacagatccaattgggagaacaaatgcaccttcaggatttgcaagtacgaattggtttaataataatgcaccatcgttttctgccatagaggctgccgttattaggcctccgcatctacttgattttccagaacagcttacaattttcagcgtattaagtcgatggagtaatactcaatatatgaattactgggtgggacatagacttgaatcgcgaacaataagggggtcattaagtacctcgacacacggaaataccaatacttctattaatcctgtaacattacagttcacatctcgtgacgtttatagaacagaatcatatgcagggataaatatacttctaactactcctgtgaatggagtaccttgggctagatttaattggagaaatcccctgaattctcttagaggtagccttctctatactatagggtatactggagtggggacacaactatttgattcagaaactgaattaccaccagaaacaacagaacgaccaaattatgaatcttacagtcatagattatctaatataagactaatatcaggaaacactttgagagcaccagtatattcttggacgcaccgtagtgcagatcgtacgaatacgattgctacaaatattattactcaaattcctgcagtgaagggaaactttctttttaatggttctgtaatttcaggaccaggatttactggtggggacttagttagattaaataatagtggaaataatattcaaaatagaggctaccttgaggttccgattcaattcatctccacatctaccagatatcgagttcgtgtacgttatgcttctgtaaccccgattcaactcagtgttaattggggtaattcaaacattttttccagcatagtaccagctacagctacgtcattagataatctacaatcaagggattttggttattttgaaagtaccaatgcatttacatctgcaacaggtaatgtagtaggtgttagaaattttagtgagaatgcaggagtgataatagacagatttgaatttatcccagttactgcaaccttcgaagcagaatatgatttagaaagagcgcaagag

SEQ ID NO: 111 - protein, 650 aa, Bacillus thuringiensis
MPSNRKNENEIINALSIPAVSNHSAQMDLSPDARIEDSLCVAEGNNIDPFVSASTVQTGISIAGRILGVLGVPFAGQLASFYSFLVGELWPSGRDPWEIFMEHVEQIVRQQITDSVRDTAIARLEGLGRGYRSYQQALETWLDNRNDARSRSIIRERYIALELDITTAIPLFSIRNQEVPLLMVYAQAANLHLLLLRDASLFGSEWGMSSADVNQYYQEQIRYTEEYSNHCVQWYNTGLNRLRGTTAESWVRYNQFRRDLTLGVLDLVALFPSYDTRTYPIPTTAQLTREVYTDPNGVVAGPNNSWFRNGASFSAIENAIIRQPHLYDFLTNLTIYTRRSQVGTTIMNLWAGHRITFNRIQGGSTSEMVYGAITNPVSVSDIPFVNRDVYRTVSLAGGLGSLSGIRYGLTRVDFDMIFRNHPDIVTGLFYHPGHAGIATQVKDSETELPPETTEQPNYRAFSHLLSHISMGPTTQDVPPVYSWTHQSADRTNTINSDRITQIPLVKAHTLQSGTTVVKGPGFTGGDILRRTSGGPFAFSNVNLDFNLSQRYRARIRYASTTNLRIYVTVAGERIFAGQFDKTMDAGAPLTFQSFSYATINTAFTFPERSSSLTVGADTFSSGNEVYVDRFELIPVTATFEAESDLERARK

SEQ ID NO: 112 - DNA, 1950 bp, Bacillus thuringiensis
atgccttcaaataggaaaaatgagaatgaaattataaatgctttatcgattccagctgtatcgaatcattccgcacaaatggatctatcaccagatgctcgcattgaggatagcttgtgtgtagccgaggggaacaatattgatccatttgttagcgcatcaacagtccaaacaggtattagtatagctggtagaatattaggcgtattaggggtgccgtttgccggacaactagctagtttttatagttttcttgttggggaattatggcctagcggcagagatccatgggaaatttttatggaacatgtcgaacaaattgtaagacaacaaataacggacagtgttagggataccgctattgctcgtttagaaggtctaggaagagggtatagatcttaccagcaggctcttgaaacttggttagataaccgaaatgatgcaagatcaagaagcattattcgtgagagatatattgctttagaacttgacattactactgctataccgcttttcagcatacgaaatcaagaggttccattattaatggtatatgctcaagctgcaaatttacacctattattattgagagacgcatccctttttggtagtgaatgggggatgtcatctgccgatgttaaccaatattaccaagaacaaatcagatatacagaggaatattctaaccattgcgtacaatggtataatacagggctaaatagattaagagggacaactgccgaaagttgggtacggtataatcaattccgtagagacctaacattaggtgtattagatttagtggcactattcccaagctatgacactcggacttatcccattccaactaccgcccaacttacaagagaagtgtatacagatccaaacggtgttgtagcaggacccaataatagttggtttagaaatggagcttcgttttccgctatagaaaacgcaattattcgacaacctcacctatatgattttctaacgaaccttacaatttacacgagaagaagtcaagtaggcactacaattatgaatttgtgggcagggcatagaatcacgtttaatagaatacaaggtggttctactagtgaaatggtgtatggggctattactaacccagttagtgttagtgacataccatttgtcaatcgggatgtttaccgaactgtatcattagctggtgggcttggctctctgagtggaatacgttatggtttaactagagttgattttgatatgatatttcgtaaccatcctgatatagtaactggattattttatcatccgggacacgcgggcattgcaacccaagtaaaagattcagaaacagaattaccacctgaaacgacagaacagccaaattatagagcatttagtcatctactaagtcatatttcaatgggtccaacgactcaagacgtacctccagtatattcttggacacaccagagtgcagatcgtacgaatacaatcaattcggataggataacacaaataccattggtaaaggcgcataccctccaatcgggtaccactgtagtaaaagggccagggtttacaggaggggatatcctccgtcgaacaagtggaggaccatttgcttttagtaatgttaatctagattttaacttgtcacaaaggtatcgtgctagaattcgttatgcctctactactaacctaagaatttacgtaacggttgcaggtgaacgaatttttgctggtcaatttgacaaaactatggatgctggtgccccattaacattccaatcttttagttacgcaactattaatacagcttttacattcccagaaagatcgagcagcttgactgtaggtgccgatacgtttagttcaggtaatgaagtttatgtagatagatttgaattaatcccagttactgcaaccttcgaggcagaatctgatttagaaagagcgcggaag

SEQ ID NO: 113 - protein, 655 aa, Artificial Sequence
  Cry1B variant
MPSNRKNENEIINALSIPAVSNHSAQMDLSLDARIEDSLCIAEGNNINPLVSASTVQTGINIAGRILGVLGVPFAGQLASFYSFIVGELWPSGRDPWEIFMEHVEQLVRQHITMNARNTALARLQGLGASFRAYQQSLEDWLENRDNARTRSVLYTQYIALELDFLNAMPLFAINNQQVPLLMVYAQAANLHLLLLRDASLFGSEFGLTSQEIQRYYERQAEKTREYSDYCARWYNTGLNNLRGTNAESWLRYNQFRRDLTLGVLDLVALFPSYDTRIYPINTSAQLTREIYTDPIGRTNAPSGFASTNWFNNNAPSFSAIEAAIFRPPHLLDFPEQLTIYSASSRWSSTQHMNYWVGHRLYFRPIGGTLNTSTHGATNTSINPVTLQFTSRDVYRTESYAGINILLTTPVNGVPWARFNWRNPLNSLRGSLLYTIGYTGVGTQLFDSETELPPETTERPNYESYSHRLSNIRLIIGGTLRAPVYSWTHRSADRTNTIATNIITQIPAVKGNFLFNGLVISGPGFTGGDLVRLNNSGNNIQNRGYIEVPIQFISTSTRYRVRVRYASVTPIRLSVNWGNSNIFSSIVPATATSLDNLQSRNFGYFESRNAFTSATGNVVGVRNFSENAGVIIDRFEFIPVTATFEAEYDLERAQE

SEQ ID NO: 114 - protein, 655 aa, Artificial Sequence
  Cry1B variant
MPSNRKNENEIINALSIPAVSNHSAQMDLSLDARIEDSLCIAEGNNINPLVSASTVQTGINIAGRILGVLGVPFAGQLASFYSFIVGELWPSGRDPWEIFMEHVEQLVRQHITMNARNTALARLQGLGASFRAYQQSLEDWLENRDNARTRSVLYTQYIALELDFLNAMPLFAINNQQVPLLMVYAQAANLHLLLLRDASLFGSEFGLTSQEIQRYYERQAEKTREYSDYCARWYNTGLNNLRGTNAESWLRYNQFRRDLTLGVLDLVALFPSYDTRIYPINTSAQLTREIYTDPIGRTNAPSGFASTNWFNNNAPSFSAIEAAIFRPPHLLDFPEQLTIYSASSRWSSTQHMNYWVGHRLNFRPIGGTLNTSTHGATNTSINPVTLQFTSRDVYRTESYAGINILLTTPVNGVPWARFNWRNPLNSLRGSLLYTIGYTGVGTQLFDSETELPPETTERPNYESYSHRLSNIRLIIGGTLRAPVYSWTHRSADRTNTIATNIITQIPAVKGNFLFNGLVISGPGFTGGDLVRLNNSGNNIQNRGYIEVPIQFRSTSTRYRVRVRYASVTPIRLSVNWGNSNIFSSIVPATATSLDNLQSRNFGYFESRNAFTSATGNVVGVRNFSENAGVIIDRFEFIPVTATFEAEYDLERAQE

SEQ ID NO: 115 - protein, 655 aa, Artificial Sequence
  Cry1B variant
MPSNRKNENEIINALSIPAVSNHSAQMDLSLDARIEDSLCIAEGNNINPLVSASTVQTGINIAGRILGVLGVPFAGQLASFYSFIVGELWPSGRDPWEIFMEHVEQLVRQHITMNARNTALARLQGLGASFRAYQQSLEDWLENRDNARTRSVLYTQYIALELDFLNAMPLFAINNQQVPLLMVYAQAANLHLLLLRDASLFGSEFGLTSQEIQRYYERQAEKTREYSDYCARWYNTGLNNLRGTNAESWLRYNQFRRDLTLGVLDLVALFPSYDTRIYPINTSAQLTREIYTDPIGRTNAPSGFASTNWFNNNAPSFSAIEAAIFRPPHLLDFPEQLTIYSASSRWSSTQHMNYWVGHRLNFRPIGGTLNTSTHGATNTSINPVTLQFTSRDVYRTESYAGINILLTTPVNGVPWARFNWRNPLNSLRGSLLYTIGYTGVGTQLFDSETELPPETTERPNYESYSHRLSNIRLIIGGTLRAPVYSWTHRSADRTNTIATNIITQIPAVKGNFLFNGLVISGPGFTGGDLVRLNNSGNNIQNRGYIEVPIQFISTSTRYRVRVRYASVTPIRLSVNWGNSNIFSSIVPATATSLDNLQSRNFGYFESRNAFTSATGNVVGVRNFSENAGVIIDRFEFIPVTATFLAEYDLERAQE

SEQ ID NO: 116 - protein, 655 aa, Artificial Sequence
  Cry1B variant
MPSNRKNENEIINALSIPAVSNHSAQMDLSLDARIEDSLCIAEGNNINPLVSASTVQTGINIAGRILGVLGVPFAGQLASFYSFIVGELWPSGRDPWEIFMEHVEQLVRQHITMNARNTALARLQGLGASFRAYQQSLEDWLENRDNARTRSVLYTQYIALELDFLNAMPLFAINNQQVPLLMVYAQAANLHLLLLRDASLFGSEFGLTSQEIQRYYERQAEKTREYSDYCARWYNTGLNNLRGTNAESWLRYNQFRRDLTLGVLDLVALFPSYDTRIYPINTSAQLTREIYTDPIGRTNAPSGFASTNWFNNNAPSFSAIEAAIFRPPHLLDFPEQLTIYSASSRWSSTQHMNYWVGHRLNFRPIGGTLNTSTHGATNTSINPVTLQFTSRDVYRTESYAGINILLTTPVNGVPWARFNWRNPLNSLRGSLLYTIGYTGVGTQLFDSETELPPETTERPNYESYSHRLSNIRLIIGGTLRAPVYSWTHRSADRTNTIATNIITQIPAVKGNFLFNGLVISGPGFTGGDLVRLNNSGNNIQNRGYIEVPIQFISTSTRYRVRVRYASVTPIRLSVNWGNSNIFSSIVPATATSLDNLQSRNFGYFESRNAFTSATGNVVGVRNFSENAGVIIDRFEFIPVTATFTAEYDLERAQE

SEQ ID NO: 117 - protein, 655 aa, Artificial Sequence
  Cry1B variant
MPSNRKNENEIINALSIPAVSNHSAQMDLSLDARIEDSLCIAEGNNINPLVSASTVQTGINIAGRILGVLGVPFAGQLASFYSFIVGELWPSGRDPWEIFMEHVEQLVRQHITMNARNTALARLQGLGASFRAYQQSLEDWLENRDNARTRSVLYTQYIALELDFLNAMPLFAINNQQVPLLMVYAQAANLHLLLLRDASLFGSEFGLTSQEIQRYYERQAEKTREYSDYCARWYNTGLNNLRGTNAESWLRYNQFRRDLTLGVLDLVALFPSYDTRIYPINTSAQLTREIYTDPIGRTNAPSGFASTNWFNNNAPSFSAIEAAIFRPPHLLDFPEQLTIYSASSRWSSTQHMNYWVGHRLNFRPIGGTLNTSTHGATNTSINPVTLQFTSRDVYRTESYAGINILLTTPVNGVPWARFNWRNPLNSLRGSLLYTIGYTGVGTQLFDSETELPPETTERPNYESYSHRLSNIRLIIGGTLRAPVYSWTHRSADRTNTIATNIITQIPAVKGNFLFNGLVISGPGFTGGDLVRLNNSGNNIQNRGYIEVPIQFISTSTRYRVRVRYASVTPIRLSVNWGNSNIFSSIVPATATSLDNLQSRNFGYFESRNAFTSATGNVVGVRNFSENAGVIIDRFEFIPVTATFEHEYDLERAQE

SEQ ID NO: 118 - protein, 655 aa, Artificial Sequence
  Cry1B variant
MPSNRKNENEIINALSIPAVSNHSAQMDLSLDARIEDSLCIAEGNNINPLVSASTVQTGINIAGRILGVLGVPFAGQLASFYSFIVGELWPSGRDPWEIFMEHVEQLVRQHITMNARNTALARLQGLGASFRAYQQSLEDWLENRDNARTRSVLYTQYIALELDFLNAMPLFAINNQQVPLLMVYAQAANLHLLLLRDASLFGSEFGLTSQEIQRYYERQAEKTREYSDYCARWYNTGLNNLRGTNAESWLRYNQFRRDLTLGVLDLVALFPSYDTRIYPINTSAQLTREIYTDPIGRTNAPSGFASTNWFNNNAPSFSAIEAAIFRPPHLLDFPEQLTIYSASSRWSSTQHMNYWVGHRLYFRPIGGTLNTSTHGATNTSINPVTLQFTSRDVYRTESYAGINILLTTPVNGVPWARFNWRNPLNSLRGSLLYTIGYTGVGTQLFDSETELPPETTERPNYESYSHRLSNIRLIIGGTLRAPVYSWTHRSADRTNTIATNIITQIPAVKGNFLFNGLVISGPGFTGGDLVRLNNSGNNIQNRGYIEVPIQFISTSTRYRVRVRYASVTPIRLSVNWGNSNIFSSIVPATATSLSNLQSRNFGYFHSRNAFTSATGNVVGVRNFSENAGVIIDRFEFIPVTATFEAEYDLERAQE

SEQ ID NO: 119 - protein, 655 aa, Artificial Sequence
  Cry1B variant
MPSNRKNENEIINALSIPAVSNHSAQMDLSLDARIEDSLCIAEGNNINPLVSASTVQTGINIAGRILGVLGVPFAGQLASFYSFIVGELWPSGRDPWEIFMEHVEQLVRQHITMNARNTALARLQGLGASFRAYQQSLEDWLENRDNARTRSVLYTQYIALELDFLNAMPLFAINNQQVPLLMVYAQAANLHLLLLRDASLFGSEFGLTSQEIQRYYERQAEKTREYSDYCARWYNTGLNNLRGTNAESWLRYNQFRRDLTLGVLDLVALFPSYDTRIYPINTSAQLTREIYTDPIGRTNAPSGFASTNWFNNNAPSFSAIEAAIFRPPHLLDFPEQLTIYSASSRWSSTQHMNYWVGHRLYFRPIGGTLNTSTHGATNTSINPVTLQFTSRDVYRTESYAGINILLTTPVNGVPWARFNWRNPLNSLRGSLLYTIGYTGVGTQLFDSETELPPETTERPNYESYSHRLSNIRLIIGGTLRAPVYSWTHRSADRTNTIATNIITQIPAVKGNFLFNGLVISGPGFTGGDLVRLNNSGNNIQNRGYIEVPIQFISTSTRYRVRVRYASVTPIRLSVNWGNSNIFSSIVPATATSLSNLQSRNFGYFQSRNAFTSATGNVVGVRNFSENAGVIIDRFEFIPVTATFEAEYDLERAQE

SEQ ID NO: 120 - protein, 655 aa, Artificial Sequence
  Cry1B variant
MPSNRKNENEIINALSIPAVSNHSAQMDLSLDARIEDSLCIAEGNNINPLVSASTVQTGINIAGRILGVLGVPFAGQLASFYSFIVGELWPSGRDPWEIFMEHVEQLVRQHITMNARNTALARLQGLGASFRAYQQSLEDWLENRDNARTRSVLYTQYIALELDFLNAMPLFAINNQQVPLLMVYAQAANLHLLLLRDASLFGSEFGLTSQEIQRYYERQAEKTREYSDYCARWYNTGLNNLRGTNAESWLRYNQFRRDLTLGVLDLVALFPSYDTRIYPINTSAQLTREIYTDPIGRTNAPSGFASTNWFNNNAPSFSAIEAAIFRPPHLLDFPEQLTIYSASSRWSSTQHMNYWVGHRLYFRPIGGTLNTSTHGATNTSINPVTLQFTSRDVYRTESYAGINILLTTPVNGVPWARFNWRNPLNSLRGSLLYTIGYTGVGTQLFDSETELPPETTERPNYESYSHRLSNIRLIIGGTLRAPVYSWTHRSADRTNTIATNIITQIPAVKGNFLFNGLVISGPGFTGGDLVRLNNSGNNIQNRGYIEVPIQFISTSTRYRVRVRYASVTPIRLSVNWGNSNIFSSIVPATATSLSTLQSRNFGYFHSRNAFTSATGNVVGVRNFSENAGVIIDRFEFIPVTATFEAEYDLERAQE

SEQ ID NO: 121 - protein, 655 aa, Artificial Sequence
  Cry1B variant
MPSNRKNENEIINALSIPAVSNHSAQMDLSLDARIEDSLCIAEGNNINPLVSASTVQTGINIAGRILGVLGVPFAGQLASFYSFIVGELWPSGRDPWEIFMEHVEQLVRQHITMNARNTALARLQGLGASFRAYQQSLEDWLENRDNARTRSVLYTQYIALELDFLNAMPLFAINNQQVPLLMVYAQAANLHLLLLRDASLFGSEFGLTSQEIQRYYERQAEKTREYSDYCARWYNTGLNNLRGTNAESWLRYNQFRRDLTLGVLDLVALFPSYDTRIYPINTSAQLTREIYTDPIGRTNAPSGFASTNWFNNNAPSFSAIEAAIFRPPHLLDFPEQLTIYSASSRWSSTQHMNYWVGHRLYFRPIGGTLNTSTHGATNTSINPVTLQFTSRDVYRTESYAGINILLTTPVNGVPWARFNWRNPLNSLRGSLLYTIGYTGVGTQLFDSETELPPETTERPNYESYSHRLSNIRLIIGGTLRAPVYSWTHRSADRTNTIATNIITQIPAVKGNFLFNGLVISGPGFTGGDLVRLNNSGNNIQNRGYIEVPIQFISTSTRYRVRVRYASVTPIRLSVNWGNSNIFSSIVPATATSLSVLQSRNFGYFESRNAFTSATGNVVGVRNFSENAGVIIDRFEFIPVTATFEAEYDLERAQE

SEQ ID NO: 122 - protein, 655 aa, Artificial Sequence
  Cry1B variant
MPSNRKNENEIINALSIPAVSNHSAQMDLSLDARIEDSLCIAEGNNINPLVSASTVQTGINIAGRILGVLGVPFAGQLASFYSFIVGELWPSGRDPWEIFMEHVEQLVRQHITMNARNTALARLQGLGASFRAYQQSLEDWLENRDNARTRSVLYTQYIALELDFLNAMPLFAINNQQVPLLMVYAQAANLHLLLLRDASLFGSEFGLTSQEIQRYYERQAEKTREYSDYCARWYNTGLNNLRGTNAESWLRYNQFRRDLTLGVLDLVALFPSYDTRIYPINTSAQLTREIYTDPIGRTNAPSGFASTNWFNNNAPSFSAIEAAIFRPPHLLDFPEQLTIYSASSRWSSTQHMNYWVGHRLYFRPIGGTLNTSTHGATNTSINPVTLQFTSRDVYRTESYAGINILLTTPVNGVPWARFNWRNPLNSLRGSLLYTIGYTGVGTQLFDSETELPPETTERPNYESYSHRLSNIRLIIGGTLRAPVYSWTHRSADRTNTIATNIITQIPAVKGNFLFNGLVISGPGFTGGDLVRLNNSGNNIQNRGYIEVPIQFISTSTRYRVRVRYASVTPIRLSVNWGNSNIFSSIVPATATSLSVLQSRNFGYFQSRNAFTSATGNVVGVRNFSENAGVIIDRFEFIPVTATFEAEYDLERAQE

SEQ ID NO: 123 - protein, 655 aa, Artificial Sequence
  Cry1B variant
MPSNRKNENEIINALSIPAVSNHSAQMDLSLDARIEDSLCIAEGNNINPLVSASTVQTGINIAGRILGVLGVPFAGQLASFYSFIVGELWPSGRDPWEIFMEHVEQLVRQHITMNARNTALARLQGLGASFRAYQQSLEDWLENRDNARTRSVLYTQYIALELDFLNAMPLFAINNQQVPLLMVYAQAANLHLLLLRDASLFGSEFGLTSQEIQRYYERQAEKTREYSDYCARWYNTGLNNLRGTNAESWLRYNQFRRDLTLGVLDLVALFPSYDTRIYPINTSAQLTREIYTDPIGRTNAPSGFASTNWFNNNAPSFSAIEAAIFRPPHLLDFPEQLTIYSASSRWSSTQHMNYWVGHRLYFRPIGGTLNTSTHGATNTSINPVTLQFTSRDVYRTESYAGINILLTTPVNGVPWARFNWRNPLNSLRGSLLYTIGYTGVGTQLFDSETELPPETTERPNYESYSHRLSNIRLIIGGTLRAPVYSWTHRSADRTNTIATNIITQIPAVKGNFLFNGLVISGPGFTGGDLVRLNNSGNNIQNRGYIEVPIQFISTSTRYRVRVRYASVTPIRLSVNWGNSNIFSSIVPATATSLDTLQSRNFGYFQSRNAFTSATGNVVGVRNFSENAGVIIDRFEFIPVTATFEAEYDLERAQE

SEQ ID NO: 124 - protein, 655 aa, Artificial Sequence
  Cry1B variant
MPSNRKNENEIINALSIPAVSNHSAQMDLSLDARIEDSLCIAEGNNINPLVSASTVQTGINIAGRILGVLGVPFAGQLASFYSFIVGELWPSGRDPWEIFMEHVEQLVRQHITMNARNTALARLQGLGASFRAYQQSLEDWLENRDNARTRSVLYTQYIALELDFLNAMPLFAINNQQVPLLMVYAQAANLHLLLLRDASLFGSEFGLTSQEIQRYYERQAEKTREYSDYCARWYNTGLNNLRGTNAESWLRYNQFRRDLTLGVLDLVALFPSYDTRIYPINTSAQLTREIYTDPIGRTNAPSGFASTNWFNNNAPSFSAIEAAIFRPPHLLDFPEQLTIYSASSRWSSTQHMNYWVGHRLYFRPIGGTLNTSTHGATNTSINPVTLQFTSRDVYRTESYAGINILLTTPVNGVPWARFNWRNPLNSLRGSLLYTIGYTGVGTQLFDSETELPPETTERPNYESYSHRLSNIRLIIGGTLRAPVYSWTHRSADRTNTIATNIITQIPAVKGNFLFNGLVISGPGFTGGDLVRLNNSGNNIQNRGYIEVPIQFISTSTRYRVRVRYASVTPIRLSVNWGNSNIFSSIVPATATSLDVLQSRNFGYFHSRNAFTSATGNVVGVRNFSENAGVIIDRFEFIPVTATFEAEYDLERAQE

SEQ ID NO: 125 - protein, 655 aa, Artificial Sequence
  Cry1B variant
MPSNRKNENEIINALSIPAVSNHSAQMDLSLDARIEDSLCIAEGNNINPLVSASTVQTGINIAGRILGVLGVPFAGQLASFYSFIVGELWPSGRDPWEIFMEHVEQLVRQHITMNARNTALARLQGLGASFRAYQQSLEDWLENRDNARTRSVLYTQYIALELDFLNAMPLFAINNQQVPLLMVYAQAANLHLLLLRDASLFGSEFGLTSQEIQRYYERQAEKTREYSDYCARWYNTGLNNLRGTNAESWLRYNQFRRDLTLGVLDLVALFPSYDTRIYPINTSAQLTREIYTDPIGRTNAPSGFASTNWFNNNAPSFSAIEAAIFRPPHLLDFPEQLTIYSASSRWSSTQHMNYWVGHRLNFRPIGGTLNTSTHGATNTSINPVTLQFTSRDVYRTESYAGINILLTTPVNGVPWARFNWRNPLNSLRGSLLYTIGYTGVGTQLFDSETELPPETTERPNYESYSHRLSNIRLIIGGTLRAPVYSWTHRSADRTNTIATNIITQIPAVKGNFLFNGLVISGPGFTGGDLVRLNNSGNNIQNRGYIEVPIQFRSTSTRYRVRVRYASVTPIRLSVNWGNSNIFSSIVPATATSLDTLQSRNFGYFHSRNAFTSATGNVVGVRNFSENAGVIIDRFEFIPVTATFEAEYDLERAQE

SEQ ID NO: 126 - protein, 655 aa, Artificial Sequence
  Cry1B variant
MPSNRKNENEIINALSIPAVSNHSAQMDLSLDARIEDSLCIAEGNNINPLVSASTVQTGINIAGRILGVLGVPFAGQLASFYSFIVGELWPSGRDPWEIFMEHVEQLVRQHITMNARNTALARLQGLGASFRAYQQSLEDWLENRDNARTRSVLYTQYIALELDFLNAMPLFAINNQQVPLLMVYAQAANLHLLLLRDASLFGSEFGLTSQEIQRYYERQAEKTREYSDYCARWYNTGLNNLRGTNAESWLRYNQFRRDLTLGVLDLVALFPSYDTRIYPINTSAQLTREIYTDPIGRTNAPSGFASTNWFNNNAPSFSAIEAAIFRPPHLLDFPEQLTIYSASSRWSSTQHMNYWVGHRLNFRPIGGTLNTSTHGATNTSINPVTLQFTSRDVYRTESYAGINILLTTPVNGVPWARFNWRNPLNSLRGSLLYTIGYTGVGTQLFDSETELPPETTERPNYESYSHRLSNIRLIIGGTLRAPVYSWTHRSADRTNTIATNIITQIPAVKGNFLFNGLVISGPGFTGGDLVRLNNSGNNIQNRGYIEVPIQFRSTSTRYRVRVRYASVTPIRLSVNWGNSNIFSSIVPATATSLDVLQSRNFGYFHSRNAFTSATGNVVGVRNFSENAGVIIDRFEFIPVTATFEAEYDLERAQE

SEQ ID NO: 127 - protein, 655 aa, Artificial Sequence
  Cry1B variant
MPSNRKNENEIINALSIPAVSNHSAQMDLSLDARIEDSLCIAEGNNINPLVSASTVQTGINIAGRILGVLGVPFAGQLASFYSFIVGELWPSGRDPWEIFMEHVEQLVRQHLTYNARNTALARLQGLGASFRAYQQSLEDWLENRDNARTRSVLYTQYIALELDFLNAMPLFAINNQQVPLLMVYAQAANLHLLLLRDASLFGSEFGLTSQEIQRYYERQAEKTREYSDYCARWYNTGLNNLRGTNAESWLRYNQFRRDLTLGVLDLVALFPSYDTRIYPINTSAQLTREIYTDPIGRTNAPSGFASTNWFNNNAPSFSAIEAAIFRPPHLLDFPEQLTIYSASSRWSSTQHMNYWVGHRLNFRPIGGTLNTSTHGATNTSINPVTLQFTSRDVYRTESYAGINILLTTPVNGVPWARFNWRNPLNSLRGSLLYTIGYTGVGTQLFDSETELPPETTERPNYESYSHRLSNIRLIIGGTLRAPVYSWTHRSADRTNTIATNIITQIPAVKGNFLFNGLVISGPGFTGGDLVRLNNSGNNIQNRGYIEVPIQFISTSTRYRVRVRYASVTPIRLSVNWGNSNIFSSIVPATATSLDNLQSRNFGYFESRNAFTSATGNVVGVRNFSENAGVIIDRFEFIPVTATFEHEYDLERAQE

SEQ ID NO: 128 - protein, 655 aa, Artificial Sequence
  Cry1B variant
MPSNRKNENEIINALSIPAVSNHSAQMDLSLDARIEDSLCIAEGNNINPLVSASTVQTGINIAGRILGVLGVPFAGQLASFYSFIVGELWPSGRDPWEIFMEHVEQLVRQHITYNARNTALARLQGLGASFRAYQQSLEDWLENRDNARTRSVLYTQYIALELDFLNAMPLFAINNQQVPLLMVYAQAANLHLLLLRDASLFGSEFGLTRQEIQRYYERQAEKTREYSDYCARWYNTGLNNLRGTNAESWLRYNQFRRDLTLGVLDLVALFPSYDTRIYPINTSAQLTREIYTDPIGRTNAPSGFASTNWFNNNAPSFSAIEAAIFRPPHLLDFPEQLTIYSASSRWSSTQHMNYWVGHRLNFRPIGGTLNTSTHGATNTSINPVTLQFTSRDVYRTESYAGINILLTTPVNGVPWARFNWRNPLNSLRGSLLYTIGYTGVGTQLFDSETELPPETTERPNYESYSHRLSNIRLIIGGTLRAPVYSWTHRSADRTNTIATNIITQIPAVKGNFLFNGLVISGPGFTGGDLVRLNNSGNNIQNRGYIEVPIQFISTSTRYRVRVRYASVTPIRLSVNWGNSNIFSSIVPATATSLDNLQSRNFGYFESRNAFTSATGNVVGVRNFSENAGVIIDRFEFIPVTATFEHEYDLERAQE

SEQ ID NO: 129 - protein, 655 aa, Artificial Sequence
  Cry1B variant
MPSNRKNENEIINALSIPAVSNHSAQMDLSLDARIEDSLCIAEGNNINPLVSASTVQTGINIAGRILGVLGVPFAGQLASFYSFIVGELWPSGRDPWEIFMEHVEQLVRQHITYNARNTALARLQGLGASFRAYQQSLEDWLENRDNARTRSVLYTQYIALELDFLNAMPLFAINNQQVPLLMVYAQAANLHLLLLRDASLFGSEFGLTSQEIQRYYERQAEKTREYSDYCARWYNTGLNNLRGHNAESWLRYNQFRRDLTLGVLDLVALFPSYDTRIYPINTSAQLTREIYTDPIGRTNAPSGFASTNWFNNNAPSFSAIEAAIFRPPHLLDFPEQLTIYSASSRWSSTQHMNYWVGHRLNFRPIGGTLNTSTHGATNTSINPVTLQFTSRDVYRTESYAGINILLTTPVNGVPWARFNWRNPLNSLRGSLLYTIGYTGVGTQLFDSETELPPETTERPNYESYSHRLSNIRLIIGGTLRAPVYSWTHRSADRTNTIATNIITQIPAVKGNFLFNGLVISGPGFTGGDLVRLNNSGNNIQNRGYIEVPIQFISTSTRYRVRVRYASVTPIRLSVNWGNSNIFSSIVPATATSLDNLQSRNFGYFESRNAFTSATGNVVGVRNFSENAGVIIDRFEFIPVTATFEHEYDLERAQE

SEQ ID NO: 130 - protein, 655 aa, Artificial Sequence
  Cry1B variant
MPSNRKNENEIINALSIPAVSNHSAQMDLSLDARIEDSLCIAEGNNINPLVSASTVQTGINIAGRILGVLGVPFAGQLASFYSFIVGELWPSGRDPWEIFMEHVEQLVRQHITMNARNTALARLQGLGASFRAYQQSLEDWLENRDNARTRSVLYTQYIALELDFLNAMPLFAINNQQVPLLMVYAQAANLHLLLLRDASLFGSEFGLTSQEIQRYYERQAEKTREYSDYCARWYNTGLNNLRGTNAESWLRYNQFRRDLTLGVLDLVALFPSYDTRIYPINTSAQLTREIYTDPIGRTNAPSGFASTNWFNNNAPSFSAIEAAIFRPPHLLDFPEQLTIYSASSRWSSTQHMNYWVGHRLNFRPIGGTLNTSTHGATNTSINPVTLQFTSRDVYRTESYAGINILLTTPVNGVPWARFNWRNPLNSLRGSLLYTIGYTGVGTQLFDSETELPPETTERPNYESYSHRLSNIRLIIGGTLRAPVYSWTHRSADRTNTIATNIITQIPAVKGNFLFNGLVISGPGFTGGDLVRLNNSGNNIQNRGYIEVPIQFISTSTRYRVRVRYASVTPIRLSVNWGNSNIFSSIVPATATSLDNLQSRNFGYFESRNAFTSATGNVVGVRNFSENAGVIIDRFEFIPVTATFEAEYDLERAQE

SEQ ID NO: 131 - protein, 655 aa, Artificial Sequence
  Cry1B variant
MPSNRKNENEIINALSIPAVSNHSAQMDLSLDARIEDSLCIAEGNNINPLVSASTVQTGINIAGRILGVLGVPFAGQLASFYSFIVGELWPSGRDPWEIFMEHVEQLVRQHITMNARNTALARLQGLGASFRAYQQSLEDWLENRDNARTRSVLYTQYIALELDFLNAMPLFAINNQQVPLLMVYAQAANLHLLLLRDASLFGSEFGLTSQEIQRYYERQAEKTREYSDYCARWYNTGLNNLRGTNAESWLRYNQFRRDLTLGVLDLVALFPSYDTRIYPINTSAQLTREIYTDPIGRTNAPSGFASTNWFNNNAPSFSAIEAAIFRPPHLLDFPEQLTIYSASSRWSSTQHMNYWVGHRLNFRPIGGTLNTSTHGATNTSINPVTLQFTSRDVYRTESYAGINILLTTPVNGVPWARFNWRNPLNSLRGSLLYTIGYTGVGTQLFDSETELPPETTERPNYESYSHRLSNIRLIIGGTLRAPVYSWTHRSADRTNTIATNIITQIPAVKGNFLFNGLVIGGPGFTGGDLVRLNNSGNNIQNRGYIEVPIQFISTSTRYRVRVRYASVTPIRLSVNWGNSNIFSSIVPATATSLDNLQSRNFGYFESRNAFTSATGNVVGVRNFSENAGVIIDRFEFIPVTATFEAEYDLERAQE

SEQ ID NO: 132 - protein, 655 aa, Artificial Sequence
  Cry1B variant
MPSNRKNENEIINALSIPAVSNHSAQMDLSLDARIEDSLCIAEGNNINPLVSASTVQTGINIAGRILGVLGVPFAGQLASFYSFIVGELWPSGRDPWEIFMEHVEQLVRQHITMNARNTALARLQGLGASFRAYQQSLEDWLENRDNARTRSVLYTQYIALELDFLNAMPLFAINNQQVPLLMVYAQAANLHLLLLRDASLFGSEFGLTSQEIQRYYERQAEKTREYSDYCARWYNTGLNNLRGTNAESWLRYNQFRRDLTLGVLDLVALFPSYDTRIYPINTSAQLTREIYTDPIGRTNAPSGFASTNWFNNNAPSFSAIEAAIFRPPHLLDFPEQLTIYSASSRWSSTQHMNYWVGHRLNFRPIGGTLNTSTHGATNTSINPVTLQFTSRDVYRTESYAGINILLTTPVNGVPWARFNWRNPLNSLRGSLLYTIGYTGVGTQLFDSETELPPETTERPNYESYSHRLSNIRLIIGGTLRAPVYSWTHRSADRTNTIATNIITQIPAVKGNFLFNGLVISGPGFTGGDLVRLNESGNNIQNRGYIEVPIQFISTSTRYRVRVRYASVTPIRLSVNWGNSNIFSSIVPATATSLDNLQSRNFGYFESRNAFTSATGNVVGVRNFSENAGVIIDRFEFIPVTATFEAEYDLERAQE

SEQ ID NO: 133 - protein, 655 aa, Artificial Sequence
  Cry1B variant
MPSNRKNENEIINALSIPAVSNHSAQMDLSLDARIEDSLCIAEGNNINPLVSASTVQTGINIAGRILGVLGVPFAGQLASFYSFIVGELWPSGRDPWEIFMEHVEQLVRQHITMNARNTALARLQGLGASFRAYQQSLEDWLENRDNARTRSVLYTQYIALELDFLNAMPLFAINNQQVPLLMVYAQAANLHLLLLRDASLFGSEFGLTSQEIQRYYERQAEKTREYSDYCARWYNTGLNNLRGTNAESWLRYNQFRRDLTLGVLDLVALFPSYDTRIYPINTSAQLTREIYTDPIGRTNAPSGFASTNWFNNNAPSFSAIEAAIFRPPHLLDFPEQLTIYSASSRWSSTQHMNYWVGHRLNFRPIGGTLNTSTHGATNTSINPVTLQFTSRDVYRTESYAGINILLTTPVNGVPWARFNWRNPLNSLRGSLLYTIGYTGVGTQLFDSETELPPETTERPNYESYSHRLSNIRLIIGGTLRAPVYSWTHRSADRTNTIATNIITQIPAVKGNFLFNGLVISGPGFTGGDLVRLNNSGNNIQNRGYIEVPIQFPSTSTRYRVRVRYASVTPIRLSVNWGNSNIFSSIVPATATSLDNLQSRNFGYFESRNAFTSATGNVVGVRNFSENAGVIIDRFEFIPVTATFEAEYDLERAQE

SEQ ID NO: 134 - protein, 655 aa, Artificial Sequence
  Cry1B variant
MPSNRKNENEIINALSIPAVSNHSAQMDLSLDARIEDSLCIAEGNNINPLVSASTVQTGINIAGRILGVLGVPFAGQLASFYSFIVGELWPSGRDPWEIFMEHVEQLVRQHITMNARNTALARLQGLGASFRAYQQSLEDWLENRDNARTRSVLYTQYIALELDFLNAMPLFAINNQQVPLLMVYAQAANLHLLLLRDASLFGSEFGLTSQEIQRYYERQAEKTREYSDYCARWYNTGLNNLRGTNAESWLRYNQFRRDLTLGVLDLVALFPSYDTRIYPINTSAQLTREIYTDPIGRTNAPSGFASTNWFNNNAPSFSAIEAAIFRPPHLLDFPEQLTIYSASSRWSSTQHMNYWVGHRLNFRPIGGTLNTSTHGATNTSINPVTLQFTSRDVYRTESYAGINILLTTPVNGVPWARFNWRNPLNSLRGSLLYTIGYTGVGTQLFDSETELPPETTERPNYESYSHRLSNIRLIIGGTLRAPVYSWTHRSADRTNTIATNIITQIPAVKGNFLFNGLVISGPGFTGGDLVRLNNSGNNIQNRGYIEVPIQFQSTSTRYRVRVRYASVTPIRLSVNWGNSNIFSSIVPATATSLDNLQSRNFGYFESRNAFTSATGNVVGVRNFSENAGVIIDRFEFIPVTATFEAEYDLERAQE

SEQ ID NO: 135 - protein, 655 aa, Artificial Sequence
  Cry1B variant
MPSNRKNENEIINALSIPAVSNHSAQMDLSLDARIEDSLCIAEGNNINPLVSASTVQTGINIAGRILGVLGVPFAGQLASFYSFIVGELWPSGRDPWEIFMEHVEQLVRQHITMNARNTALARLQGLGASFRAYQQSLEDWLENRDNARTRSVLYTQYIALELDFLNAMPLFAINNQQVPLLMVYAQAANLHLLLLRDASLFGSEFGLTSQEIQRYYERQAEKTREYSDYCARWYNTGLNNLRGTNAESWLRYNQFRRDLTLGVLDLVALFPSYDTRIYPINTSAQLTREIYTDPIGRTNAPSGFASTNWFNNNAPSFSAIEAAIFRPPHLLDFPEQLTIYSASSRWSSTQHMNYWVGHRLNFRPIGGTLNTSTHGATNTSINPVTLQFTSRDVYRTESYAGINILLTTPVNGVPWARFNWRNPLNSLRGSLLYTIGYTGVGTQLFDSETELPPETTERPNYESYSHRLSNIRLIIGGTLRAPVYSWTHRSADRTNTIATNIITQIPAVKGNFLFNGLVISGPGFTGGDLVRLNNSGNNIQNRGYIEVPIQFISTSTRYRVRVRYASATPIRLSVNWGNSNIFSSIVPATATSLDNLQSRNFGYFESRNAFTSATGNVVGVRNFSENAGVIIDRFEFIPVTATFEAEYDLERAQE

SEQ ID NO: 136 - protein, 655 aa, Artificial Sequence
  Cry1B variant
MPSNRKNENEIINALSIPAVSNHSAQMDLSLDARIEDSLCIAEGNNINPLVSASTVQTGINIAGRILGVLGVPFAGQLASFYSFIVGELWPSGRDPWEIFMEHVEQLVRQHITMNARNTALARLQGLGASFRAYQQSLEDWLENRDNARTRSVLYTQYIALELDFLNAMPLFAINNQQVPLLMVYAQAANLHLLLLRDASLFGSEFGLTSQEIQRYYERQAEKTREYSDYCARWYNTGLNNLRGTNAESWLRYNQFRRDLTLGVLDLVALFPSYDTRIYPINTSAQLTREIYTDPIGRTNAPSGFASTNWFNNNAPSFSAIEAAIFRPPHLLDFPEQLTIYSASSRWSSTQHMNYWVGHRLNFRPIGGTLNTSTHGATNTSINPVTLQFTSRDVYRTESYAGINILLTTPVNGVPWARFNWRNPLNSLRGSLLYTIGYTGVGTQLFDSETELPPETTERPNYESYSHRLSNIRLIIGGTLRAPVYSWTHRSADRTNTIATNIITQIPAVKGNFLFNGLVISGPGFTGGDLVRLNNSGNNIQNRGYIEVPIQFISTSTRYRVRVRYASGTPIRLSVNWGNSNIFSSIVPATATSLDNLQSRNFGYFESRNAFTSATGNVVGVRNFSENAGVIIDRFEFIPVTATFEAEYDLERAQE

SEQ ID NO: 137 - protein, 655 aa, Artificial Sequence
  Cry1B variant
MPSNRKNENEIINALSIPAVSNHSAQMDLSLDARIEDSLCIAEGNNINPLVSASTVQTGINIAGRILGVLGVPFAGQLASFYSFIVGELWPSGRDPWEIFMEHVEQLVRQHITMNARNTALARLQGLGASFRAYQQSLEDWLENRDNARTRSVLYTQYIALELDFLNAMPLFAINNQQVPLLMVYAQAANLHLLLLRDASLFGSEFGLTSQEIQRYYERQAEKTREYSDYCARWYNTGLNNLRGTNAESWLRYNQFRRDLTLGVLDLVALFPSYDTRIYPINTSAQLTREIYTDPIGRTNAPSGFASTNWFNNNAPSFSAIEAAIFRPPHLLDFPEQLTIYSASSRWSSTQHMNYWVGHRLNFRPIGGTLNTSTHGATNTSINPVTLQFTSRDVYRTESYAGINILLTTPVNGVPWARFNWRNPLNSLRGSLLYTIGYTGVGTQLFDSETELPPETTERPNYESYSHRLSNIRLIIGGTLRAPVYSWTHRSADRTNTIATNIITQIPAVKGNFLFNGLVISGPGFTGGDLVRLNNSGNNIQNRGYIEVPIQFISTSTRYRVRVRYASVTPIRLSVNWGNSNIFSSIVPATATSLDNLQSRNFGYFESRNAFTSATGNVVGVRNFSENAGVIIDRFEFIPVTALFEAEYDLERAQE

SEQ ID NO: 138 - protein, 655 aa, Artificial Sequence
  Cry1B variant
MPSNRKNENEIINALSIPAVSNHSAQMDLSLDARIEDSLCIAEGNNINPLVSASTVQTGINIAGRILGVLGVPFAGQLASFYSFIVGELWPSGRDPWEIFMEHVEQLVRQHITMNARNTALARLQGLGASFRAYQQSLEDWLENRDNARTRSVLYTQYIALELDFLNAMPLFAINNQQVPLLMVYAQAANLHLLLLRDASLFGSEFGLTSQEIQRYYERQAEKTREYSDYCARWYNTGLNNLRGTNAESWLRYNQFRRDLTLGVLDLVALFPSYDTRIYPINTSAQLTREIYTDPIGRTNAPSGFASTNWFNNNAPSFSAIEAAIFRPPHLLDFPEQLTIYSASSRWSSTQHMNYWVGHRLNFRPIGGTLNTSTHGATNTSINPVTLQFTSRDVYRTESYAGINILLTTPVNGVPWARFNWRNPLNSLRGSLLYTIGYTGVGTQLFDSETELPPETTERPNYESYSHRLSNIRLIIGGTLRAPVYSWTHRSADRTNTIATNIITQIPAVKGNFLFNGLVISGPGFTGGDLVRLNNSGNNIQNRGYIEVPIQFISTSTRYRVRVRYASVTPIRLSVNWGNSNIFSSIVPATATSLSTLQSRNFGYFESRNAFTSATGNVVGVRNFSENAGVIIDRFEFIPVTATFEAEYDLERAQE

SEQ ID NO: 139 - protein, 655 aa, Artificial Sequence
  Cry1B variant
MPSNRKNENEIINALSIPAVSNHSAQMDLSLDARIEDSLCIAEGNNINPLVSASTVQTGINIAGRILGVLGVPFAGQLASFYSFIVGELWPSGRDPWEIFMEHVEQLVRQHITMNARNTALARLQGLGASFRAYQQSLEDWLENRDNARTRSVLYTQYIALELDFLNAMPLFAINNQQVPLLMVYAQAANLHLLLLRDASLFGSEFGLTSQEIQRYYERQAEKTREYSDYCARWYNTGLNNLRGTNAESWLRYNQFRRDLTLGVLDLVALFPSYDTRIYPINTSAQLTREIYTDPIGRTNAPSGFASTNWFNNNAPSFSAIEAAIFRPPHLLDFPEQLTIYSASSRWSSTQHMNYWVGHRLYFRPIGGTLNTSTHGATNTSINPVTLQFTSRDVYRTESYAGINILLTTPVNGVPWARFNWRNPLNSLRGSLLYTIGYTGVGTQLFDSETELPPETTERPNYESYSHRLSNIRLIIGGTLRAPVYSWTHRSADRTNTIATNIITQIPAVKGNFLFNGLVISGPGFTGGDLVRLNNSGNNIQNRGYIEVPIQFISTSTRYRVRVRYASVTPIRLSVNWGNSNIFSSIVPATATSLSTLQSRNFGYFQSRNAFTSATGNVVGVRNFSENAGVIIDRFEFIPVTATFEAEYDLERAQE

SEQ ID NO: 140 - protein, 655 aa, Artificial Sequence
  Cry1B variant
MPSNRKNENEIINALSIPAVSNHSAQMDLSLDARIEDSLCIAEGNNINPLVSASTVQTGINIAGRILGVLGVPFAGQLASFYSFIVGELWPSGRDPWEIFMEHVEQLVRQHITMNARNTALARLQGLGASFRAYQQSLEDWLENRDNARTRSVLYTQYIALELDFLNAMPLFAINNQQVPLLMVYAQAANLHLLLLRDASLFGSEFGLTSQEIQRYYERQAEKTREYSDYCARWYNTGLNNLRGTNAESWLRYNQFRRDLTLGVLDLVALFPSYDTRIYPINTSAQLTREIYTDPIGRTNAPSGFASTNWFNNNAPSFSAIEAAIFRPPHLLDFPEQLTIYSASSRWSSTQHMNYWVGHRLYFRPIGGTLNTSTHGATNTSINPVTLQFTSRDVYRTESYAGINILLTTPVNGVPWARFNWRNPLNSLRGSLLYTIGYTGVGTQLFDSETELPPETTERPNYESYSHRLSNIRLIIGGTLRAPVYSWTHRSADRTNTIATNIITQIPAVKGNFLFNGLVISGPGFTGGDLVRLNNSGNNIQNRGYIEVPIQFISTSTRYRVRVRYASVTPIRLSVNWGNSNIFSSIVPATATSLSVLQSRNFGYFHSRNAFTSATGNVVGVRNFSENAGVIIDRFEFIPVTATFEAEYDLERAQE

SEQ ID NO: 141 - protein, 655 aa, Artificial Sequence
  Cry1B variant
MPSNRKNENEIINALSIPAVSNHSAQMDLSLDARIEDSLCIAEGNNINPLVSASTVQTGINIAGRILGVLGVPFAGQLASFYSFIVGELWPSGRDPWEIFMEHVEQLVRQHITMNARNTALARLQGLGASFRAYQQSLEDWLENRDNARTRSVLYTQYIALELDFLNAMPLFAINNQQVPLLMVYAQAANLHLLLLRDASLFGSEFGLTSQEIQRYYERQAEKTREYSDYCARWYNTGLNNLRGTNAESWLRYNQFRRDLTLGVLDLVALFPSYDTRIYPINTSAQLTREIYTDPIGRTNAPSGFASTNWFNNNAPSFSAIEAAIFRPPHLLDFPEQLTIYSASSRWSSTQHMNYWVGHRLYFRPIGGTLNTSTHGATNTSINPVTLQFTSRDVYRTESYAGINILLTTPVNGVPWARFNWRNPLNSLRGSLLYTIGYTGVGTQLFDSETELPPETTERPNYESYSHRLSNIRLIIGGTLRAPVYSWTHRSADRTNTIATNIITQIPAVKGNFLFNGLVISGPGFTGGDLVRLNNSGNNIQNRGYIEVPIQFISTSTRYRVRVRYASVTPIRLSVNWGNSNIFSSIVPATATSLDTLQSRNFGYFHSRNAFTSATGNVVGVRNFSENAGVIIDRFEFIPVTATFEAEYDLERAQE

SEQ ID NO: 142 - protein, 655 aa, Artificial Sequence
  Cry1B variant
MPSNRKNENEIINALSIPAVSNHSAQMDLSLDARIEDSLCIAEGNNINPLVSASTVQTGINIAGRILGVLGVPFAGQLASFYSFIVGELWPSGRDPWEIFMEHVEQLVRQHITMNARNTALARLQGLGASFRAYQQSLEDWLENRDNARTRSVLYTQYIALELDFLNAMPLFAINNQQVPLLMVYAQAANLHLLLLRDASLFGSEFGLTSQEIQRYYERQAEKTREYSDYCARWYNTGLNNLRGTNAESWLRYNQFRRDLTLGVLDLVALFPSYDTRIYPINTSAQLTREIYTDPIGRTNAPSGFASTNWFNNNAPSFSAIEAAIFRPPHLLDFPEQLTIYSASSRWSSTQHMNYWVGHRLYFRPIGGTLNTSTHGATNTSINPVTLQFTSRDVYRTESYAGINILLTTPVNGVPWARFNWRNPLNSLRGSLLYTIGYTGVGTQLFDSETELPPETTERPNYESYSHRLSNIRLIIGGTLRAPVYSWTHRSADRTNTIATNIITQIPAVKGNFLFNGLVISGPGFTGGDLVRLNNSGNNIQNRGYIEVPIQFISTSTRYRVRVRYASVTPIRLSVNWGNSNIFSSIVPATATSLDVLQSRNFGYFQSRNAFTSATGNVVGVRNFSENAGVIIDRFEFIPVTATFEAEYDLERAQE

SEQ ID NO: 143 - protein, 655 aa, Artificial Sequence
  Cry1B variant
MPSNRKNENEIINALSIPAVSNHSAQMDLSLDARIEDSLCIAEGNNINPLVSASTVQTGINIAGRILGVLGVPFAGQLASFYSFIVGELWPSGRDPWEIFMEHVEQLVRQHITMNARNTALARLQGLGASFRAYQQSLEDWLENRDNARTRSVLYTQYIALELDFLNAMPLFAINNQQVPLLMVYAQAANLHLLLLRDASLFGSEFGLTSQEIQRYYERQAEKTREYSDYCARWYNTGLNNLRGTNAESWLRYNQFRRDLTLGVLDLVALFPSYDTRIYPINTSAQLTREIYTDPIGRTNAPSGFASTNWFNNNAPSFSAIEAAIFRPPHLLDFPEQLTIYSASSRWSSTQHMNYWVGHRLNFRPIGGTLNTSTHGATNTSINPVTLQFTSRDVYRTESYAGINILLTTPVNGVPWARFNWRNPLNSLRGSLLYTIGYTGVGTQLFDSETELPPETTERPNYESYSHRLSNIRLIIGGTLRAPVYSWTHRSADRTNTIATNIITQIPAVKGNFLFNGLVISGPGFTGGDLVRLNNSGNNIQNRGYIEVPIQFRSTSTRYRVRVRYASVTPIRLSVNWGNSNIFSSIVPATATSLSNLQSRNFGYFHSRNAFTSATGNVVGVRNFSENAGVIIDRFEFIPVTATFEAEYDLERAQE

SEQ ID NO: 144 - protein, 655 aa, Artificial Sequence
  Cry1B variant
MPSNRKNENEIINALSIPAVSNHSAQMDLSLDARIEDSLCIAEGNNINPLVSASTVQTGINIAGRILGVLGVPFAGQLASFYSFIVGELWPSGRDPWEIFMEHVEQLVRQHITMNARNTALARLQGLGASFRAYQQSLEDWLENRDNARTRSVLYTQYIALELDFLNAMPLFAINNQQVPLLMVYAQAANLHLLLLRDASLFGSEFGLTSQEIQRYYERQAEKTREYSDYCARWYNTGLNNLRGTNAESWLRYNQFRRDLTLGVLDLVALFPSYDTRIYPINTSAQLTREIYTDPIGRTNAPSGFASTNWFNNNAPSFSAIEAAIFRPPHLLDFPEQLTIYSASSRWSSTQHMNYWVGHRLNFRPIGGTLNTSTHGATNTSINPVTLQFTSRDVYRTESYAGINILLTTPVNGVPWARFNWRNPLNSLRGSLLYTIGYTGVGTQLFDSETELPPETTERPNYESYSHRLSNIRLIIGGTLRAPVYSWTHRSADRTNTIATNIITQIPAVKGNFLFNGLVISGPGFTGGDLVRLNNSGNNIQNRGYIEVPIQFRSTSTRYRVRVRYASVTPIRLSVNWGNSNIFSSIVPATATSLDVLQSRNFGYFQSRNAFTSATGNVVGVRNFSENAGVIIDRFEFIPVTATFEAEYDLERAQE

SEQ ID NO: 145 - protein, 655 aa, Artificial Sequence
  Cry1B variant
MPSNRKNENEIINALSIPAVSNHSAQMDLSLDARIEDSLCIAEGNNINPLVSASTVQTGINIAGRILGVLGVPFAGQLASFYSFIVGELWPSGRDPWEIFMEHVEQLVRQHITMNARNTALARLQGLGASFRAYQQSLEDWLENRDNARTRSVLYTQYIALELDFLNAMPLFAINNQQVPLLMVYAQAANLHLLLLRDASLFGSEFGLTSQEIQRYYERQAEKTREYSDYCARWYNTGLNNLRGTNAESWLRYNQFRRDLTLGVLDLVALFPSYDTRIYPINTSAQLTREIYTDPIGRTNAPSGFASTNWFNNNAPSFSAIEAAIFRPPHLLDFPEQLTIYSASSRWSSTQHMNYWVGHRLNFRPIGGTLNTSTHGATNTSINPVTLQFTSRDVYRTESYAGINILLTTPVNGVPWARFNWRNPLNSLRGSLLYTIGYTGVGTQLFDSETELPPETTERPNYESYSHRLSNIRLIIGGTLRAPVYSWTHRSADRTNTIATNIITQIPAVKGNFLFNGLVISGPGFTGGDLVRLNNSGNNIQNRGYIEVPIQFRSTSTRYRVRVRYASVTPIRLSVNWGNSNIFSSIVPATATSLSNLQSRNFGYFQSRNAFTSATGNVVGVRNFSENAGVIIDRFEFIPVTATFEAEYDLERAQE

SEQ ID NO: 146 - protein, 655 aa, Artificial Sequence
  Cry1B variant
MPSNRKNENEIINALSIPAVSNHSAQMDLSLDARIEDSLCIAEGNNINPLVSASTVQTGINIAGRILGVLGVPFAGQLASFYSFIVGELWPSGRDPWEIFMEHVEQLVRQHITMNARNTALARLQGLGASFRAYQQSLEDWLENRDNARTRSVLYTQYIALELDFLNAMPLFAINNQQVPLLMVYAQAANLHLLLLRDASLFGSEFGLTSQEIQRYYERQAEKTREYSDYCARWYNTGLNNLRGTNAESWLRYNQFRRDLTLGVLDLVALFPSYDTRIYPINTSAQLTREIYTDPIGRTNAPSGFASTNWFNNNAPSFSAIEAAIFRPPHLLDFPEQLTIYSASSRWSSTQHMNYWVGHRLNFRPIGGTLNTSTHGATNTSINPVTLQFTSRDVYRTESYAGINILLTTPVNGVPWARFNWRNPLNSLRGSLLYTIGYTGVGTQLFDSETELPPETTERPNYESYSHRLSNIRLIIGGTLRAPVYSWTHRSADRTNTIATNIITQIPAVKGNFLFNGLVISGPGFTGGDLVRLNNSGNNIQNRGYIEVPIQFRSTSTRYRVRVRYASVTPIRLSVNWGNSNIFSSIVPATATSLSTLQSRNFGYFESRNAFTSATGNVVGVRNFSENAGVIIDRFEFIPVTATFEAEYDLERAQE

SEQ ID NO: 147 - protein, 655 aa, Artificial Sequence
  Cry1B variant
MPSNRKNENEIINALSIPAVSNHSAQMDLSLDARIEDSLCIAEGNNINPLVSASTVQTGINIAGRILGVLGVPFAGQLASFYSFIVGELWPSGRDPWEIFMEHVEQLVRQHITMNARNTALARLQGLGASFRAYQQSLEDWLENRDNARTRSVLYTQYIALELDFLNAMPLFAINNQQVPLLMVYAQAANLHLLLLRDASLFGSEFGLTSQEIQRYYERQAEKTREYSDYCARWYNTGLNNLRGTNAESWLRYNQFRRDLTLGVLDLVALFPSYDTRIYPINTSAQLTREIYTDPIGRTNAPSGFASTNWFNNNAPSFSAIEAAIFRPPHLLDFPEQLTIYSASSRWSSTQHMNYWVGHRLNFRPIGGTLNTSTHGATNTSINPVTLQFTSRDVYRTESYAGINILLTTPVNGVPWARFNWRNPLNSLRGSLLYTIGYTGVGTQLFDSETELPPETTERPNYESYSHRLSNIRLIIGGTLRAPVYSWTHRSADRTNTIATNIITQIPAVKGNFLFNGLVISGPGFTGGDLVRLNNSGNNIQNRGYIEVPIQFRSTSTRYRVRVRYASVTPIRLSVNWGNSNIFSSIVPATATSLSTLQSRNFGYFHSRNAFTSATGNVVGVRNFSENAGVIIDRFEFIPVTATFEAEYDLERAQE

SEQ ID NO: 148 - protein, 655 aa, Artificial Sequence
  Cry1B variant
MPSNRKNENEIINALSIPAVSNHSAQMDLSLDARIEDSLCIAEGNNINPLVSASTVQTGINIAGRILGVLGVPFAGQLASFYSFIVGELWPSGRDPWEIFMEHVEQLVRQHITMNARNTALARLQGLGASFRAYQQSLEDWLENRDNARTRSVLYTQYIALELDFLNAMPLFAINNQQVPLLMVYAQAANLHLLLLRDASLFGSEFGLTSQEIQRYYERQAEKTREYSDYCARWYNTGLNNLRGTNAESWLRYNQFRRDLTLGVLDLVALFPSYDTRIYPINTSAQLTREIYTDPIGRTNAPSGFASTNWFNNNAPSFSAIEAAIFRPPHLLDFPEQLTIYSASSRWSSTQHMNYWVGHRLNFRPIGGTLNTSTHGATNTSINPVTLQFTSRDVYRTESYAGINILLTTPVNGVPWARFNWRNPLNSLRGSLLYTIGYTGVGTQLFDSETELPPETTERPNYESYSHRLSNIRLIIGGTLRAPVYSWTHRSADRTNTIATNIITQIPAVKGNFLFNGLVISGPGFTGGDLVRLNNSGNNIQNRGYIEVPIQFRSTSTRYRVRVRYASVTPIRLSVNWGNSNIFSSIVPATATSLSVLQSRNFGYFESRNAFTSATGNVVGVRNFSENAGVIIDRFEFIPVTATFEAEYDLERAQE

SEQ ID NO: 149 - protein, 655 aa, Artificial Sequence
  Cry1B variant
MPSNRKNENEIINALSIPAVSNHSAQMDLSLDARIEDSLCIAEGNNINPLVSASTVQTGINIAGRILGVLGVPEAGQLASFYSFIVGELWPSGRDPWEIFMEHVEQLVRQSITMNARNTALARLQGLGASFRAYQQSLEDWLENRDNARTRSVLYTQYIALELDFLNAMPLFAINNQQVPLLMVYAQAANLHLLLLRDASLFGSEFGLTSQEIQRYYERQAEKTREYSDYCARWYNTGLNNLRGTNAESWLRYNQFRRDLTLGVLDLVALFPSYDTRIYPINTSAQLTREIYTDPIGRTNAPSGFASTNWFNNNAPSFSAIEAAIFRPPHLLDFPEQLTIYSASSRWSSTQHMNYWVGHRLNFRPIGGTLNTSTHGATNTSINPVTLQFTSRDVYRTESYAGINILLTTPVNGVPWARFNWRNPLNSLRGSLLYTIGYTGVGTQLFDSETELPPETTERPNYESYSHRLSNIRLIIGGTLRAPVYSWTHRSADRTNTIATNIITQIPAVKGNFLFNGLVISGPGFTGGDLVRLNNSGNNIQNRGYIEVPIQFISTSTRYRVRVRYASVTPIRLSVNWGNSNIFSSIVPATATSLDNLQSRNFGYFESRNAFTSATGNVVGVRNFSENAGVIIDRFEFIPVTATFEAEYDLERAQE

SEQ ID NO: 150 - protein, 655 aa, Artificial Sequence
  Cry1B variant
MPSNRKNENEIINALSIPAVSNHSAQMDLSLDARIEDSLCIAEGNNINPLVSASTVQTGINIAGRILGVLGVPFAGQLASFYSFIVGELWPSGRDPWEIFMEHVEQLVRQSLTMNARNTALARLQGLGASFRAYQQSLEDWLENRDNARTRSVLYTQYIALELDFLNAMPLFAINNQQVPLLMVYAQAANLHLLLLRDASLFGSEFGLTSQEIQRYYERQAEKTREYSDYCARWYNTGLNNLRGTNAESWLRYNQFRRDLTLGVLDLVALFPSYDTRIYPINTSAQLTREIYTDPIGRTNAPSGFASTNWFNNNAPSFSAIEAAIFRPPHLLDFPEQLTIYSASSRWSSTQHMNYWVGHRLNFRPIGGTLNTSTHGATNTSINPVTLQFTSRDVYRTESYAGINILLTTPVNGVPWARFNWRNPLNSLRGSLLYTIGYTGVGTQLFDSETELPPETTERPNYESYSHRLSNIRLIIGGTLRAPVYSWTHRSADRTNTIATNIITQIPAVKGNFLFNGLVISGPGFTGGDLVRLNNSGNNIQNRGYIEVPIQFISTSTRYRVRVRYASVTPIRLSVNWGNSNIFSSIVPATATSLDNLQSRNFGYFESRNAFTSATGNVVGVRNFSENAGVIIDRFEFIPVTATFEAEYDLERAQE

SEQ ID NO: 151 - protein, 655 aa, Artificial Sequence
  Cry1B variant
MPSNRKNENEIINALSIPAVSNHSAQMDLSLDARIEDSLCIAEGNNINPLVSASTVQTGINIAGRILGVLGVPFAGQLASFYSFIVGELWPSGRDPWEIFMEHVEQLVRQSITYNARNTALARLQGLGASFRAYQQSLEDWLENRDNARTRSVLYTQYIALELDFLNAMPLFAINNQQVPLLMVYAQAANLHLLLLRDASLFGSEFGLTSQEIQRYYERQAEKTREYSDYCARWYNTGLNNLRGTNAESWLRYNQFRRDLTLGVLDLVALFPSYDTRIYPINTSAQLTREIYTDPIGRTNAPSGFASTNWFNNNAPSFSAIEAAIFRPPHLLDFPEQLTIYSASSRWSSTQHMNYWVGHRLNFRPIGGTLNTSTHGATNTSINPVTLQFTSRDVYRTESYAGINILLTTPVNGVPWARFNWRNPLNSLRGSLLYTIGYTGVGTQLFDSETELPPETTERPNYESYSHRLSNIRLIIGGTLRAPVYSWTHRSADRTNTIATNIITQIPAVKGNFLFNGLVISGPGFTGGDLVRLNNSGNNIQNRGYIEVPIQFISTSTRYRVRVRYASVTPIRLSVNWGNSNIFSSIVPATATSLDNLQSRNFGYFESRNAFTSATGNVVGVRNFSENAGVIIDRFEFIPVTATFEAEYDLERAQE

SEQ ID NO: 152 - protein, 655 aa, Artificial Sequence
  Cry1B variant
MPSNRKNENEIINALSIPAVSNHSAQMDLSLDARIEDSLCIAEGNNINPLVSASTVQTGINIAGRILGVLGVPFAGQLASFYSFIVGELWPSGRDPWEIFMEHVEQLVRQSITMNARNTALARLQGLGASFRAYQQSLEDWLENRDNAATRSVLYTQYIALELDFLNAMPLFAINNQQVPLLMVYAQAANLHLLLLRDASLFGSEFGLTSQEIQRYYERQAEKTREYSDYCARWYNTGLNNLRGTNAESWLRYNQFRRDLTLGVLDLVALFPSYDTRIYPINTSAQLTREIYTDPIGRTNAPSGFASTNWFNNNAPSFSAIEAAIFRPPHLLDFPEQLTIYSASSRWSSTQHMNYWVGHRLNFRPIGGTLNTSTHGATNTSINPVTLQFTSRDVYRTESYAGINILLTTPVNGVPWARFNWRNPLNSLRGSLLYTIGYTGVGTQLFDSETELPPETTERPNYESYSHRLSNIRLIIGGTLRAPVYSWTHRSADRTNTIATNIITQIPAVKGNFLFNGLVISGPGFTGGDLVRLNNSGNNIQNRGYIEVPIQFISTSTRYRVRVRYASVTPIRLSVNWGNSNIFSSIVPATATSLDNLQSRNFGYFESRNAFTSATGNVVGVRNFSENAGVIIDRFEFIPVTATFEAEYDLERAQE

SEQ ID NO: 153 - protein, 655 aa, Artificial Sequence
  Cry1B variant
MPSNRKNENEIINALSIPAVSNHSAQMDLSLDARIEDSLCIAEGNNINPLVSASTVQTGINIAGRILGVLGVPFAGQLASFYSFIVGELWPSGRDPWEIFMEHVEQLVRQSITMNARNTALARLQGLGASFRAYQQSLEDWLENRDNARTRSVLYTQYIALELDFLNAMPLFAINNQQVPLLMVYAQAANLHLLLLRDASLFGSEFGLTRQEIQRYYERQAEKTREYSDYCARWYNTGLNNLRGTNAESWLRYNQFRRDLTLGVLDLVALFPSYDTRIYPINTSAQLTREIYTDPIGRTNAPSGFASTNWFNNNAPSFSAIEAAIFRPPHLLDFPEQLTIYSASSRWSSTQHMNYWVGHRLNFRPIGGTLNTSTHGATNTSINPVTLQFTSRDVYRTESYAGINILLTTPVNGVPWARFNWRNPLNSLRGSLLYTIGYTGVGTQLFDSETELPPETTERPNYESYSHRLSNIRLIIGGTLRAPVYSWTHRSADRTNTIATNIITQIPAVKGNFLFNGLVISGPGFTGGDLVRLNNSGNNIQNRGYIEVPIQFISTSTRYRVRVRYASVTPIRLSVNWGNSNIFSSIVPATATSLDNLQSRNFGYFESRNAFTSATGNVVGVRNFSENAGVIIDRFEFIPVTATFEAEYDLERAQE

SEQ ID NO: 154 - protein, 655 aa, Artificial Sequence
  Cry1B variant
MPSNRKNENEIINALSIPAVSNHSAQMDLSLDARIEDSLCIAEGNNINPLVSASTVQTGINIAGRILGVLGVPFAGQLASFYSFIVGELWPSGRDPWEIFMEHVEQLVRQSITMNARNTALARLQGLGASFRAYQQSLEDWLENRDNARTRSVLYTQYIALELDFLNAMPLFAINNQQVPLLMVYAQAANLHLLLLRDASLFGSEFGLTSQEIQRYYERQAEKTREYSDYCARWYNTGLNNLMGTNAESWLRYNQFRRDLTLGVLDLVALFPSYDTRIYPINTSAQLTREIYTDPIGRTNAPSGFASTNWFNNNAPSFSAIEAAIFRPPHLLDFPEQLTIYSASSRWSSTQHMNYWVGHRLNFRPIGGTLNTSTHGATNTSINPVTLQFTSRDVYRTESYAGINILLTTPVNGVPWARFNWRNPLNSLRGSLLYTIGYTGVGTQLFDSETELPPETTERPNYESYSHRLSNIRLIIGGTLRAPVYSWTHRSADRTNTIATNIITQIPAVKGNFLFNGLVISGPGFTGGDLVRLNNSGNNIQNRGYIEVPIQFISTSTRYRVRVRYASVTPIRLSVNWGNSNIFSSIVPATATSLDNLQSRNFGYFESRNAFTSATGNVVGVRNFSENAGVIIDRFEFIPVTATFEAEYDLERAQE

SEQ ID NO: 155 - protein, 655 aa, Artificial Sequence
  Cry1B variant
MPSNRKNENEIINALSIPAVSNHSAQMDLSLDARIEDSLCIAEGNNINPLVSASTVQTGINIAGRILGVLGVPFAGQLASFYSFIVGELWPSGRDPWEIFMEHVEQLVRQSITMNARNTALARLQGLGASFRAYQQSLEDWLENRDNARTRSVLYTQYIALELDFLNAMPLFAINNQQVPLLMVYAQAANLHLLLLRDASLFGSEFGLTSQEIQRYYERQAEKTREYSDYCARWYNTGLNNLVGTNAESWLRYNQFRRDLTLGVLDLVALFPSYDTRIYPINTSAQLTREIYTDPIGRTNAPSGFASTNWFNNNAPSFSAIEAAIFRPPHLLDFPEQLTIYSASSRWSSTQHMNYWVGHRLNFRPIGGTLNTSTHGATNTSINPVTLQFTSRDVYRTESYAGINILLTTPVNGVPWARFNWRNPLNSLRGSLLYTIGYTGVGTQLFDSETELPPETTERPNYESYSHRLSNIRLIIGGTLRAPVYSWTHRSADRTNTIATNIITQIPAVKGNFLFNGLVISGPGFTGGDLVRLNNSGNNIQNRGYIEVPIQFISTSTRYRVRVRYASVTPIRLSVNWGNSNIFSSIVPATATSLDNLQSRNFGYFESRNAFTSATGNVVGVRNFSENAGVIIDRFEFIPVTATFEAEYDLERAQE

SEQ ID NO: 156 - protein, 655 aa, Artificial Sequence
  Cry1B variant
MPSNRKNENEIINALSIPAVSNHSAQMDLSLDARIEDSLCIAEGNNINPLVSASTVQTGINIAGRILGVLGVPFAGQLASFYSFIVGELWPSGRDPWEIFMEHVEQLVRQSITMNARNTALARLQGLGASFRAYQQSLEDWLENRDNARTRSVLYTQYIALELDFLNAMPLFAINNQQVPLLMVYAQAANLHLLLLRDASLFGSEFGLTSQEIQRYYERQAEKTREYSDYCARWYNTGLNNLRGQNAESWLRYNQFRRDLTLGVLDLVALFPSYDTRIYPINTSAQLTREIYTDPIGRTNAPSGFASTNWFNNNAPSFSAIEAAIFRPPHLLDFPEQLTIYSASSRWSSTQHMNYWVGHRLNFRPIGGTLNTSTHGATNTSINPVTLQFTSRDVYRTESYAGINILLTTPVNGVPWARFNWRNPLNSLRGSLLYTIGYTGVGTQLFDSETELPPETTERPNYESYSHRLSNIRLIIGGTLRAPVYSWTHRSADRTNTIATNIITQIPAVKGNFLFNGLVISGPGFTGGDLVRLNNSGNNIQNRGYIEVPIQFISTSTRYRVRVRYASVTPIRLSVNWGNSNIFSSIVPATATSLDNLQSRNFGYFESRNAFTSATGNVVGVRNFSENAGVIIDRFEFIPVTATFEAEYDLERAQE

SEQ ID NO: 157 - protein, 655 aa, Artificial Sequence
  Cry1B variant
MPSNRKNENEIINALSIPAVSNHSAQMDLSLDARIEDSLCIAEGNNINPLVSASTVQTGINIAGRILGVLGVPFAGQLASFYSFIVGELWPSGRDPWEIFMEHVEQLVRQSITMNARNTALARLQGLGASFRAYQQSLEDWLENRDNARTRSVLYTQYIALELDFLNAMPLFAINNQQVPLLMVYAQAANLHLLLLRDASLFGSEFGLTSQEIQRYYERQAEKTREYSDYCARWYNTGLNNLRGHNAESWLRYNQFRRDLTLGVLDLVALFPSYDTRIYPINTSAQLTREIYTDPIGRTNAPSGFASTNWFNNNAPSFSAIEAAIFRPPHLLDFPEQLTIYSASSRWSSTQHMNYWVGHRLNFRPIGGTLNTSTHGATNTSINPVTLQFTSRDVYRTESYAGINILLTTPVNGVPWARFNWRNPLNSLRGSLLYTIGYTGVGTQLFDSETELPPETTERPNYESYSHRLSNIRLIIGGTLRAPVYSWTHRSADRTNTIATNIITQIPAVKGNFLFNGLVISGPGFTGGDLVRLNNSGNNIQNRGYIEVPIQFISTSTRYRVRVRYASVTPIRLSVNWGNSNIFSSIVPATATSLDNLQSRNFGYFESRNAFTSATGNVVGVRNFSENAGVIIDRFEFIPVTATFEAEYDLERAQE

SEQ ID NO: 158 - protein, 655 aa, Artificial Sequence
  Cry1B variant
MPSNRKNENEIINALSIPAVSNHSAQMDLSLDARIEDSLCIAEGNNINPLVSASTVQTGINIAGRILGVLGVPFAGQLASFYSFIVGELWPSGRDPWEIFMEHVEQLVRQSITMNARNTALARLQGLGASFRAYQQSLEDWLENRDNARTRSVLYTQYIALELDFLNAMPLFAINNQQVPLLMVYAQAANLHLLLLRDASLFGSEFGLTSQEIQRYYERQAEKTREYSDYCARWYNTGLNNLRGKNAESWLRYNQFRRDLTLGVLDLVALFPSYDTRIYPINTSAQLTREIYTDPIGRTNAPSGFASTNWFNNNAPSFSAIEAAIFRPPHLLDFPEQLTIYSASSRWSSTQHMNYWVGHRLNFRPIGGTLNTSTHGATNTSINPVTLQFTSRDVYRTESYAGINILLTTPVNGVPWARFNWRNPLNSLRGSLLYTIGYTGVGTQLFDSETELPPETTERPNYESYSHRLSNIRLIIGGTLRAPVYSWTHRSADRTNTIATNIITQIPAVKGNFLFNGLVISGPGFTGGDLVRLNNSGNNIQNRGYIEVPIQFISTSTRYRVRVRYASVTPIRLSVNWGNSNIFSSIVPATATSLDNLQSRNFGYFESRNAFTSATGNVVGVRNFSENAGVIIDRFEFIPVTATFEAEYDLERAQE

SEQ ID NO: 159 - protein, 655 aa, Artificial Sequence
  Cry1B variant
MPSNRKNENEIINALSIPAVSNHSAQMDLSLDARIEDSLCIAEGNNINPLVSASTVQTGINIAGRILGVLGVPEAGQLASFYSFIVGELWPSGRDPWEIFMEHVEQLVRQHITYNARNTALARLQGLGASFRAYQQSLEDWLENRDNARTRSVLYTQYIALELDFLNAMPLFAINNQQVPLLMVYAQAANLHLLLLRDASLFGSEFGLTSQEIQRYYERQAEKTREYSDYCARWYNTGLNNLRGTNAESWLRYNQFRRDLTLGVLDLVALFPSYDTRIYPINTSAQLTREIYTDPIGRTNAPSGFASTNWFNNNAPSFSAIEAAIFRPPHLLDFPEQLTIYSASSRWSSTQHMNYWVGHRLNFRPIGGTLNTSTHGATNTSINPVTLQFTSRDVYRTESYAGINILLTTPVNGVPWARFNWRNPLNSLRGSLLYTIGYTGVGTQLFDSETELPPETTERPNYESYSHRLSNIRLIIGGTLRAPVYSWTHRSADRTNTIATNIITQIPAVKGNFLFNGLVISGPGFTGGDLVRLNNSGNNIQNRGYIEVPIQFISTSTRYRVRVRYASVTPIRLSVNWGNSNIFSSIVPATATSLDNLQSRNFGYFESRNAFTSATGNVVGVRNFSENAGVIIDRFEFIPVTATFEAEYDLERAQE

SEQ ID NO: 160 - protein, 655 aa, Artificial Sequence
  Cry1B variant
MPSNRKNENEIINALSIPAVSNHSAQMDLSLDARIEDSLCIAEGNNINPLVSASTVQTGINIAGRILGVLGVPFAGQLASFYSFIVGELWPSGRDPWEIFMEHVEQLVRQHLTYNARNTALARLQGLGASFRAYQQSLEDWLENRDNARTRSVLYTQYIALELDFLNAMPLFAINNQQVPLLMVYAQAANLHLLLLRDASLFGSEFGLTSQEIQRYYERQAEKTREYSDYCARWYNTGLNNLRGTNAESWLRYNQFRRDLTLGVLDLVALFPSYDTRIYPINTSAQLTREIYTDPIGRTNAPSGFASTNWFNNNAPSFSAIEAAIFRPPHLLDFPEQLTIYSASSRWSSTQHMNYWVGHRLNFRPIGGTLNTSTHGATNTSINPVTLQFTSRDVYRTESYAGINILLTTPVNGVPWARFNWRNPLNSLRGSLLYTIGYTGVGTQLFDSETELPPETTERPNYESYSHRLSNIRLIIGGTLRAPVYSWTHRSADRTNTIATNIITQIPAVKGNFLFNGLVISGPGFTGGDLVRLNNSGNNIQNRGYIEVPIQFISTSTRYRVRVRYASVTPIRLSVNWGNSNIFSSIVPATATSLDNLQSRNFGYFESRNAFTSATGNVVGVRNFSENAGVIIDRFEFIPVTATFEAEYDLERAQE

SEQ ID NO: 161 - protein, 655 aa, Artificial Sequence
  Cry1B variant
MPSNRKNENEIINALSIPAVSNHSAQMDLSLDARIEDSLCIAEGNNINPLVSASTVQTGINIAGRILGVLGVPFAGQLASFYSFIVGELWPSGRDPWEIFMEHVEQLVRQHITYNARNTALARLQGLGASFRAYQQSLEDWLENRDNAATRSVLYTQYIALELDFLNAMPLFAINNQQVPLLMVYAQAANLHLLLLRDASLFGSEFGLTSQEIQRYYERQAEKTREYSDYCARWYNTGLNNLRGTNAESWLRYNQFRRDLTLGVLDLVALFPSYDTRIYPINTSAQLTREIYTDPIGRTNAPSGFASTNWFNNNAPSFSAIEAAIFRPPHLLDFPEQLTIYSASSRWSSTQHMNYWVGHRLNFRPIGGTLNTSTHGATNTSINPVTLQFTSRDVYRTESYAGINILLTTPVNGVPWARFNWRNPLNSLRGSLLYTIGYTGVGTQLFDSETELPPETTERPNYESYSHRLSNIRLIIGGTLRAPVYSWTHRSADRTNTIATNIITQIPAVKGNFLFNGLVISGPGFTGGDLVRLNNSGNNIQNRGYIEVPIQFISTSTRYRVRVRYASVTPIRLSVNWGNSNIFSSIVPATATSLDNLQSRNFGYFESRNAFTSATGNVVGVRNFSENAGVIIDRFEFIPVTATFEAEYDLERAQE

SEQ ID NO: 162 - protein, 655 aa, Artificial Sequence
  Cry1B variant
MPSNRKNENEIINALSIPAVSNHSAQMDLSLDARIEDSLCIAEGNNINPLVSASTVQTGINIAGRILGVLGVPFAGQLASFYSFIVGELWPSGRDPWEIFMEHVEQLVRQHITYNARNTALARLQGLGASFRAYQQSLEDWLENRDNARTRSVLYTQYIALELDFLNAMPLFAINNQQVPLLMVYAQAANLHLLLLRDASLFGSEFGLTRQEIQRYYERQAEKTREYSDYCARWYNTGLNNLRGTNAESWLRYNQFRRDLTLGVLDLVALFPSYDTRIYPINTSAQLTREIYTDPIGRTNAPSGFASTNWFNNNAPSFSAIEAAIFRPPHLLDFPEQLTIYSASSRWSSTQHMNYWVGHRLNFRPIGGTLNTSTHGATNTSINPVTLQFTSRDVYRTESYAGINILLTTPVNGVPWARFNWRNPLNSLRGSLLYTIGYTGVGTQLFDSETELPPETTERPNYESYSHRLSNIRLIIGGTLRAPVYSWTHRSADRTNTIATNIITQIPAVKGNFLFNGLVISGPGFTGGDLVRLNNSGNNIQNRGYIEVPIQFISTSTRYRVRVRYASVTPIRLSVNWGNSNIFSSIVPATATSLDNLQSRNFGYFESRNAFTSATGNVVGVRNFSENAGVIIDRFEFIPVTATFEAEYDLERAQE

SEQ ID NO: 163 - protein, 655 aa, Artificial Sequence
  Cry1B variant
MPSNRKNENEIINALSIPAVSNHSAQMDLSLDARIEDSLCIAEGNNINPLVSASTVQTGINIAGRILGVLGVPFAGQLASFYSFIVGELWPSGRDPWEIFMEHVEQLVRQHITYNARNTALARLQGLGASFRAYQQSLEDWLENRDNARTRSVLYTQYIALELDFLNAMPLFAINNQQVPLLMVYAQAANLHLLLLRDASLFGSEFGLTSQEIQRYYERQAEKTREYSDYCARWYNTGLNNLMGTNAESWLRYNQFRRDLTLGVLDLVALFPSYDTRIYPINTSAQLTREIYTDPIGRTNAPSGFASTNWFNNNAPSFSAIEAAIFRPPHLLDFPEQLTIYSASSRWSSTQHMNYWVGHRLNFRPIGGTLNTSTHGATNTSINPVTLQFTSRDVYRTESYAGINILLTTPVNGVPWARFNWRNPLNSLRGSLLYTIGYTGVGTQLFDSETELPPETTERPNYESYSHRLSNIRLIIGGTLRAPVYSWTHRSADRTNTIATNIITQIPAVKGNFLFNGLVISGPGFTGGDLVRLNNSGNNIQNRGYIEVPIQFISTSTRYRVRVRYASVTPIRLSVNWGNSNIFSSIVPATATSLDNLQSRNFGYFESRNAFTSATGNVVGVRNFSENAGVIIDRFEFIPVTATFEAEYDLERAQE

SEQ ID NO: 164 - protein, 655 aa, Artificial Sequence
  Cry1B variant
MPSNRKNENEIINALSIPAVSNHSAQMDLSLDARIEDSLCIAEGNNINPLVSASTVQTGINIAGRILGVLGVPFAGQLASFYSFIVGELWPSGRDPWEIFMEHVEQLVRQHITYNARNTALARLQGLGASFRAYQQSLEDWLENRDNARTRSVLYTQYIALELDFLNAMPLFAINNQQVPLLMVYAQAANLHLLLLRDASLFGSEFGLTSQEIQRYYERQAEKTREYSDYCARWYNTGLNNLVGTNAESWLRYNQFRRDLTLGVLDLVALFPSYDTRIYPINTSAQLTREIYTDPIGRTNAPSGFASTNWFNNNAPSFSAIEAAIFRPPHLLDFPEQLTIYSASSRWSSTQHMNYWVGHRLNFRPIGGTLNTSTHGATNTSINPVTLQFTSRDVYRTESYAGINILLTTPVNGVPWARFNWRNPLNSLRGSLLYTIGYTGVGTQLFDSETELPPETTERPNYESYSHRLSNIRLIIGGTLRAPVYSWTHRSADRTNTIATNIITQIPAVKGNFLFNGLVISGPGFTGGDLVRLNNSGNNIQNRGYIEVPIQFISTSTRYRVRVRYASVTPIRLSVNWGNSNIFSSIVPATATSLDNLQSRNFGYFESRNAFTSATGNVVGVRNFSENAGVIIDRFEFIPVTATFEAEYDLERAQE

SEQ ID NO: 165 - protein, 655 aa, Artificial Sequence
  Cry1B variant
MPSNRKNENEIINALSIPAVSNHSAQMDLSLDARIEDSLCIAEGNNINPLVSASTVQTGINIAGRILGVLGVPFAGQLASFYSFIVGELWPSGRDPWEIFMEHVEQLVRQHITYNARNTALARLQGLGASFRAYQQSLEDWLENRDNARTRSVLYTQYIALELDFLNAMPLFAINNQQVPLLMVYAQAANLHLLLLRDASLFGSEFGLTSQEIQRYYERQAEKTREYSDYCARWYNTGLNNLRGQNAESWLRYNQFRRDLTLGVLDLVALFPSYDTRIYPINTSAQLTREIYTDPIGRTNAPSGFASTNWFNNNAPSFSAIEAAIFRPPHLLDFPEQLTIYSASSRWSSTQHMNYWVGHRLNFRPIGGTLNTSTHGATNTSINPVTLQFTSRDVYRTESYAGINILLTTPVNGVPWARFNWRNPLNSLRGSLLYTIGYTGVGTQLFDSETELPPETTERPNYESYSHRLSNIRLIIGGTLRAPVYSWTHRSADRTNTIATNIITQIPAVKGNFLFNGLVISGPGFTGGDLVRLNNSGNNIQNRGYIEVPIQFISTSTRYRVRVRYASVTPIRLSVNWGNSNIFSSIVPATATSLDNLQSRNFGYFESRNAFTSATGNVVGVRNFSENAGVIIDRFEFIPVTATFEAEYDLERAQE

SEQ ID NO: 166 - protein, 655 aa, Artificial Sequence
  Cry1B variant
MPSNRKNENEIINALSIPAVSNHSAQMDLSLDARIEDSLCIAEGNNINPLVSASTVQTGINIAGRILGVLGVPFAGQLASFYSFIVGELWPSGRDPWEIFMEHVEQLVRQHITYNARNTALARLQGLGASFRAYQQSLEDWLENRDNARTRSVLYTQYIALELDFLNAMPLFAINNQQVPLLMVYAQAANLHLLLLRDASLFGSEFGLTSQEIQRYYERQAEKTREYSDYCARWYNTGLNNLRGHNAESWLRYNQFRRDLTLGVLDLVALFPSYDTRIYPINTSAQLTREIYTDPIGRTNAPSGFASTNWFNNNAPSFSAIEAAIFRPPHLLDFPEQLTIYSASSRWSSTQHMNYWVGHRLNFRPIGGTLNTSTHGATNTSINPVTLQFTSRDVYRTESYAGINILLTTPVNGVPWARFNWRNPLNSLRGSLLYTIGYTGVGTQLFDSETELPPETTERPNYESYSHRLSNIRLIIGGTLRAPVYSWTHRSADRTNTIATNIITQIPAVKGNFLFNGLVISGPGFTGGDLVRLNNSGNNIQNRGYIEVPIQFISTSTRYRVRVRYASVTPIRLSVNWGNSNIFSSIVPATATSLDNLQSRNFGYFESRNAFTSATGNVVGVRNFSENAGVIIDRFEFIPVTATFEAEYDLERAQE

SEQ ID NO: 167 - protein, 655 aa, Artificial Sequence
  Cry1B variant
MPSNRKNENEIINALSIPAVSNHSAQMDLSLDARIEDSLCIAEGNNINPLVSASTVQTGINIAGRILGVLGVPFAGQLASFYSFIVGELWPSGRDPWEIFMEHVEQLVRQHITYNARNTALARLQGLGASFRAYQQSLEDWLENRDNARTRSVLYTQYIALELDFLNAMPLFAINNQQVPLLMVYAQAANLHLLLLRDASLFGSEFGLTSQEIQRYYERQAEKTREYSDYCARWYNTGLNNLRGKNAESWLRYNQFRRDLTLGVLDLVALFPSYDTRIYPINTSAQLTREIYTDPIGRTNAPSGFASTNWFNNNAPSFSAIEAAIFRPPHLLDFPEQLTIYSASSRWSSTQHMNYWVGHRLNFRPIGGTLNTSTHGATNTSINPVTLQFTSRDVYRTESYAGINILLTTPVNGVPWARFNWRNPLNSLRGSLLYTIGYTGVGTQLFDSETELPPETTERPNYESYSHRLSNIRLIIGGTLRAPVYSWTHRSADRTNTIATNIITQIPAVKGNFLFNGLVISGPGFTGGDLVRLNNSGNNIQNRGYIEVPIQFISTSTRYRVRVRYASVTPIRLSVNWGNSNIFSSIVPATATSLDNLQSRNFGYFESRNAFTSATGNVVGVRNFSENAGVIIDRFEFIPVTATFEAEYDLERAQE

SEQ ID NO: 168 - protein, 655 aa, Artificial Sequence
  Cry1B variant
MPSNRKNENEIINALSIPAVSNHSAQMDLSLDARIEDSLCIAEGNNINPLVSASTVQTGINIAGRILGVLGVPFAGQLASFYSFIVGELWPSGRDPWEIFMEHVEQLVRQHITYNARNTALARLQGLGASFRAYQQSLEDWLENRDNARTRSVLYTQYIALELDFLNAMPLFAINNQQVPLLMVYAQAANLHLLLLRDASLFGSEFGLTSQEIQRYYERQAEKTREYSDYCARWYNTGLNNLRGTNAESWLRYNQFRRDLTLGVLDLVALFPSYDTRIYPINTSAQLTREIYTDPIGRTNAPSGFASTNWFNNNAPSFSAIEAAIFRPPHLLDFPEQLTIYSASSRWSSTQHMNYWVGHRLYFRPIGGTLNTSTHGATNTSINPVTLQFTSRDVYRTESYAGINILLTTPVNGVPWARFNWRNPLNSLRGSLLYTIGYTGVGTQLFDSETELPPETTERPNYESYSHRLSNIRLIIGGTLRAPVYSWTHRSADRTNTIATNIITQIPAVKGNFLFNGLVISGPGFTGGDLVRLNNSGNNIQNRGYIEVPIQFISTSTRYRVRVRYASVTPIRLSVNWGNSNIFSSIVPATATSLDVLQSRNFGYFHSRNAFTSATGNVVGVRNFSENAGVIIDRFEFIPVTATFEAEYDLERAQE

SEQ ID NO: 169 - protein, 655 aa, Artificial Sequence
  Cry1B variant
MPSNRKNENEIINALSIPAVSNHSAQMDLSLDARIEDSLCIAEGNNINPLVSASTVQTGINIAGRILGVLGVPFAGQLASFYSFIVGELWPSGRDPWEIFMEHVEQLVRQHLTYNARNTALARLQGLGASFRAYQQSLEDWLENRDNARTRSVLYTQYIALELDFLNAMPLFAINNQQVPLLMVYAQAANLHLLLLRDASLFGSEFGLTSQEIQRYYERQAEKTREYSDYCARWYNTGLNNLRGTNAESWLRYNQFRRDLTLGVLDLVALFPSYDTRIYPINTSAQLTREIYTDPIGRTNAPSGFASTNWFNNNAPSFSAIEAAIFRPPHLLDFPEQLTIYSASSRWSSTQHMNYWVGHRLYFRPIGGTLNTSTHGATNTSINPVTLQFTSRDVYRTESYAGINILLTTPVNGVPWARFNWRNPLNSLRGSLLYTIGYTGVGTQLFDSETELPPETTERPNYESYSHRLSNIRLIIGGTLRAPVYSWTHRSADRTNTIATNIITQIPAVKGNFLFNGLVISGPGFTGGDLVRLNNSGNNIQNRGYIEVPIQFISTSTRYRVRVRYASVTPIRLSVNWGNSNIFSSIVPATATSLDVLQSRNFGYFHSRNAFTSATGNVVGVRNFSENAGVIIDRFEFIPVTATFEAEYDLERAQE

SEQ ID NO: 170 - protein, 655 aa, Artificial Sequence
  Cry1B variant
MPSNRKNENEIINALSIPAVSNHSAQMDLSLDARIEDSLCIAEGNNINPLVSASTVQTGINIAGRILGVLGVPFAGQLASFYSFIVGELWPSGRDPWEIFMEHVEQLVRQHITYNARNTALARLQGLGASFRAYQQSLEDWLENRDNARTRSVLYTQYIALELDFLNAMPLFAINNQQVPLLMVYAQAANLHLLLLRDASLFGSEFGLTRQEIQRYYERQAEKTREYSDYCARWYNTGLNNLRGTNAESWLRYNQFRRDLTLGVLDLVALFPSYDTRIYPINTSAQLTREIYTDPIGRTNAPSGFASTNWFNNNAPSFSAIEAAIFRPPHLLDFPEQLTIYSASSRWSSTQHMNYWVGHRLYFRPIGGTLNTSTHGATNTSINPVTLQFTSRDVYRTESYAGINILLTTPVNGVPWARFNWRNPLNSLRGSLLYTIGYTGVGTQLFDSETELPPETTERPNYESYSHRLSNIRLIIGGTLRAPVYSWTHRSADRTNTIATNIITQIPAVKGNFLFNGLVISGPGFTGGDLVRLNNSGNNIQNRGYIEVPIQFISTSTRYRVRVRYASVTPIRLSVNWGNSNIFSSIVPATATSLDVLQSRNFGYFHSRNAFTSATGNVVGVRNFSENAGVIIDRFEFIPVTATFEAEYDLERAQE

SEQ ID NO: 171 - protein, 655 aa, Artificial Sequence
  Cry1B variant
MPSNRKNENEIINALSIPAVSNHSAQMDLSLDARIEDSLCIAEGNNINPLVSASTVQTGINIAGRILGVLGVPFAGQLASFYSFIVGELWPSGRDPWEIFMEHVEQLVRQHITYNARNTALARLQGLGASFRAYQQSLEDWLENRDNARTRSVLYTQYIALELDFLNAMPLFAINNQQVPLLMVYAQAANLHLLLLRDASLFGSEFGLTSQEIQRYYERQAEKTREYSDYCARWYNTGLNNLRGHNAESWLRYNQFRRDLTLGVLDLVALFPSYDTRIYPINTSAQLTREIYTDPIGRTNAPSGFASTNWFNNNAPSFSAIEAAIFRPPHLLDFPEQLTIYSASSRWSSTQHMNYWVGHRLYFRPIGGTLNTSTHGATNTSINPVTLQFTSRDVYRTESYAGINILLTTPVNGVPWARFNWRNPLNSLRGSLLYTIGYTGVGTQLFDSETELPPETTERPNYESYSHRLSNIRLIIGGTLRAPVYSWTHRSADRTNTIATNIITQIPAVKGNFLFNGLVISGPGFTGGDLVRLNNSGNNIQNRGYIEVPIQFISTSTRYRVRVRYASVTPIRLSVNWGNSNIFSSIVPATATSLDVLQSRNFGYFHSRNAFTSATGNVVGVRNFSENAGVIIDRFEFIPVTATFEAEYDLERAQE

SEQ ID NO: 172 - protein, 655 aa, Artificial Sequence
  Cry1B variant
MPSNRKNENEIINALSIPAVSNHSAQMDLSLDARIEDSLCIAEGNNINPLVSASTVQTGINIAGRILGVLGVPFAGQLASFYSFIVGELWPSGRDPWEIFMEHVEQLVRQHITYNARNTALARLQGLGASFRAYQQSLEDWLENRDNARTRSVLYTQYIALELDFLNAMPLFAINNQQVPLLMVYAQAANLHLLLLRDASLFGSEFGLTSQEIQRYYERQAEKTREYSDYCARWYNTGLNNLRGKNAESWLRYNQFRRDLTLGVLDLVALFPSYDTRIYPINTSAQLTREIYTDPIGRTNAPSGFASTNWFNNNAPSFSAIEAAIFRPPHLLDFPEQLTIYSASSRWSSTQHMNYWVGHRLYFRPIGGTLNTSTHGATNTSINPVTLQFTSRDVYRTESYAGINILLTTPVNGVPWARFNWRNPLNSLRGSLLYTIGYTGVGTQLFDSETELPPETTERPNYESYSHRLSNIRLIIGGTLRAPVYSWTHRSADRTNTIATNIITQIPAVKGNFLFNGLVISGPGFTGGDLVRLNNSGNNIQNRGYIEVPIQFISTSTRYRVRVRYASVTPIRLSVNWGNSNIFSSIVPATATSLDVLQSRNFGYFHSRNAFTSATGNVVGVRNFSENAGVIIDRFEFIPVTATFEAEYDLERAQE

SEQ ID NO: 173 - protein, 655 aa, Artificial Sequence
  Cry1B variant
MPSNRKNENEIINALSIPAVSNHSAQMDLSLDARIEDSLCIAEGNNINPLVSASTVQTGINIAGRILGVLGVPFAGQLASFYSFIVGELWPSGRDPWEIFMEHVEQLVRQHITMNARNTALARLQGLGASFRAYQQSLEDWLENRDNARTRSVLYTQYIALELDFLNAMPLFAINNQQVPLLMVYAQAANLHLLLLRDASLFGSEFGLTSQEIQRYYERQAEKTREYSDYCARWYNTGLNNLRGKNAESWLRYNQFRRDLTLGVLDLVALFPSYDTRIYPINTSAQLTREIYTDPIGRTNAPSGFASTNWFNNNAPSFSAIEAAIFRPPHLLDFPEQLTIYSASSRWSSTQHMNYWVGHRLYFRPIGGTLNTSTHGATNTSINPVTLQFTSRDVYRTESYAGINILLTTPVNGVPWARFNWRNPLNSLRGSLLYTIGYTGVGTQLFDSETELPPETTERPNYESYSHRLSNIRLIIGGTLRAPVYSWTHRSADRTNTIATNIITQIPAVKGNFLFNGLVISGPGFTGGDLVRLNNSGNNIQNRGYIEVPIQFISTSTRYRVRVRYASVTPIRLSVNWGNSNIFSSIVPATATSLDVLQSRNFGYFHSRNAFTSATGNVVGVRNFSENAGVIIDRFEFIPVTATFEAEYDLERAQE

SEQ ID NO: 174 - protein, 655 aa, Artificial Sequence
  Cry1B variant
MPSNRKNENEIINALSIPAVSNHSAQMDLSLDARIEDSLCIAEGNNINPLVSASTVNTGINIAGRILGVLGVPFAGQLASFYSFIVGELWPSGRDPWEIFMEHVEQLVRQHITMNARNTALARLQGLGASFRAYQQSLEDWLENRDNARTRSVLYTQYIALELDFLNAMPLFAINNQQVPLLMVYAQAANLHLLLLRDASLFGSEFGLTSQEIQRYYERQAEKTREYSDYCARWYNTGLNNLRGTNAESWLRYNQFRRDLTLGVLDLVALFPSYDTRIYPINTSAQLTREIYTDPIGRTNAPSGFASTNWFNNNAPSFSAIEAAIFRPPHLLDFPEQLTIYSASSRWSSTQHMNYWVGHRLNFRPIGGTLNTSTHGATNTSINPVTLQFTSRDVYRTESYAGINILLTTPVNGVPWARFNWRNPLNSLRGSLLYTIGYTGVGTQLFDSETELPPETTERPNYESYSHRLSNIRLIIGGTLRAPVYSWTHRSADRTNTIATNIITQIPAVKGNFLFNGLVISGPGFTGGDLVRLNNSGNNIQNRGYIEVPIQFISTSTRYRVRVRYASVTPIRLSVNWGNSNIFSSIVPATATSLDNLQSRNFGYFESRNAFTSATGNVVGVRNFSENAGVIIDRFEFIPVTATFEHEYDLERAQE

SEQ ID NO: 175 - protein, 655 aa, Artificial Sequence
  Cry1B variant
MPSNRKNENEIINALSIPAVSNHSAQMDLSLDARIEDSLCIAEGNNINPLVSASTVQTGINIAGRIMGVLGVPFAGQLASFYSFIVGELWPSGRDPWEIFMEHVEQLVRQHITMNARNTALARLQGLGASFRAYQQSLEDWLENRDNARTRSVLYTQYIALELDFLNAMPLFAINNQQVPLLMVYAQAANLHLLLLRDASLFGSEFGLTSQEIQRYYERQAEKTREYSDYCARWYNTGLNNLRGTNAESWLRYNQFRRDLTLGVLDLVALFPSYDTRIYPINTSAQLTREIYTDPIGRTNAPSGFASTNWFNNNAPSFSAIEAAIFRPPHLLDFPEQLTIYSASSRWSSTQHMNYWVGHRLNFRPIGGTLNTSTHGATNTSINPVTLQFTSRDVYRTESYAGINILLTTPVNGVPWARFNWRNPLNSLRGSLLYTIGYTGVGTQLFDSETELPPETTERPNYESYSHRLSNIRLIIGGTLRAPVYSWTHRSADRTNTIATNIITQIPAVKGNFLFNGLVISGPGFTGGDLVRLNNSGNNIQNRGYIEVPIQFISTSTRYRVRVRYASVTPIRLSVNWGNSNIFSSIVPATATSLDNLQSRNFGYFESRNAFTSATGNVVGVRNFSENAGVIIDRFEFIPVTATFEHEYDLERAQE

SEQ ID NO: 176 - protein, 655 aa, Artificial Sequence
  Cry1B variant
MPSNRKNENEIINALSIPAVSNHSAQMDLSLDARIEDSLCIAEGNNINPLVSASTVQTGINIAGRILGVLGVPFAGNLASFYSFIVGELWPSGRDPWEIFMEHVEQLVRQHITMNARNTALARLQGLGASFRAYQQSLEDWLENRDNARTRSVLYTQYIALELDFLNAMPLFAINNQQVPLLMVYAQAANLHLLLLRDASLFGSEFGLTSQEIQRYYERQAEKTREYSDYCARWYNTGLNNLRGTNAESWLRYNQFRRDLTLGVLDLVALFPSYDTRIYPINTSAQLTREIYTDPIGRTNAPSGFASTNWFNNNAPSFSAIEAAIFRPPHLLDFPEQLTIYSASSRWSSTQHMNYWVGHRLNFRPIGGTLNTSTHGATNTSINPVTLQFTSRDVYRTESYAGINILLTTPVNGVPWARFNWRNPLNSLRGSLLYTIGYTGVGTQLFDSETELPPETTERPNYESYSHRLSNIRLIIGGTLRAPVYSWTHRSADRTNTIATNIITQIPAVKGNFLFNGLVISGPGFTGGDLVRLNNSGNNIQNRGYIEVPIQFISTSTRYRVRVRYASVTPIRLSVNWGNSNIFSSIVPATATSLDNLQSRNFGYFESRNAFTSATGNVVGVRNFSENAGVIIDRFEFIPVTATFEHEYDLERAQE

SEQ ID NO: 177 - protein, 655 aa, Artificial Sequence
  Cry1B variant
MPSNRKNENEIINALSIPAVSNHSAQMDLSLDARIEDSLCIAEGNNINPLVSASTVQTGINIAGRILGVLGVPFAGQLISFYSFIVGELWPSGRDPWEIFMEHVEQLVRQHITMNARNTALARLQGLGASFRAYQQSLEDWLENRDNARTRSVLYTQYIALELDFLNAMPLFAINNQQVPLLMVYAQAANLHLLLLRDASLFGSEFGLTSQEIQRYYERQAEKTREYSDYCARWYNTGLNNLRGTNAESWLRYNQFRRDLTLGVLDLVALFPSYDTRIYPINTSAQLTREIYTDPIGRTNAPSGFASTNWFNNNAPSFSAIEAAIFRPPHLLDFPEQLTIYSASSRWSSTQHMNYWVGHRLNFRPIGGTLNTSTHGATNTSINPVTLQFTSRDVYRTESYAGINILLTTPVNGVPWARFNWRNPLNSLRGSLLYTIGYTGVGTQLFDSETELPPETTERPNYESYSHRLSNIRLIIGGTLRAPVYSWTHRSADRTNTIATNIITQIPAVKGNFLFNGLVISGPGFTGGDLVRLNNSGNNIQNRGYIEVPIQFISTSTRYRVRVRYASVTPIRLSVNWGNSNIFSSIVPATATSLDNLQSRNFGYFESRNAFTSATGNVVGVRNFSENAGVIIDRFEFIPVTATFEHEYDLERAQE

SEQ ID NO: 178 - protein, 655 aa, Artificial Sequence
  Cry1B variant
MPSNRKNENEIINALSIPAVSNHSAQMDLSLDARIEDSLCIAEGNNINPLVSASTVQTGINIAGRILGVLGVPFAGQLAQFYSFIVGELWPSGRDPWEIFMEHVEQLVRQHITMNARNTALARLQGLGASFRAYQQSLEDWLENRDNARTRSVLYTQYIALELDFLNAMPLFAINNQQVPLLMVYAQAANLHLLLLRDASLFGSEFGLTSQEIQRYYERQAEKTREYSDYCARWYNTGLNNLRGTNAESWLRYNQFRRDLTLGVLDLVALFPSYDTRIYPINTSAQLTREIYTDPIGRTNAPSGFASTNWFNNNAPSFSAIEAAIFRPPHLLDFPEQLTIYSASSRWSSTQHMNYWVGHRLNFRPIGGTLNTSTHGATNTSINPVTLQFTSRDVYRTESYAGINILLTTPVNGVPWARFNWRNPLNSLRGSLLYTIGYTGVGTQLFDSETELPPETTERPNYESYSHRLSNIRLIIGGTLRAPVYSWTHRSADRTNTIATNIITQIPAVKGNFLFNGLVISGPGFTGGDLVRLNNSGNNIQNRGYIEVPIQFISTSTRYRVRVRYASVTPIRLSVNWGNSNIFSSIVPATATSLDNLQSRNFGYFESRNAFTSATGNVVGVRNFSENAGVIIDRFEFIPVTATFEHEYDLERAQE

SEQ ID NO: 179 - protein, 655 aa, Artificial Sequence
  Cry1B variant
MPSNRKNENEIINALSIPAVSNHSAQMDLSLDARIEDSLCIAEGNNINPLVSASTVQTGINIAGRILGVLGVPFAGQLASFYAFIVGELWPSGRDPWEIFMEHVEQLVRQHITMNARNTALARLQGLGASFRAYQQSLEDWLENRDNARTRSVLYTQYIALELDFLNAMPLFAINNQQVPLLMVYAQAANLHLLLLRDASLFGSEFGLTSQEIQRYYERQAEKTREYSDYCARWYNTGLNNLRGTNAESWLRYNQFRRDLTLGVLDLVALFPSYDTRIYPINTSAQLTREIYTDPIGRTNAPSGFASTNWFNNNAPSFSAIEAAIFRPPHLLDFPEQLTIYSASSRWSSTQHMNYWVGHRLNFRPIGGTLNTSTHGATNTSINPVTLQFTSRDVYRTESYAGINILLTTPVNGVPWARFNWRNPLNSLRGSLLYTIGYTGVGTQLFDSETELPPETTERPNYESYSHRLSNIRLIIGGTLRAPVYSWTHRSADRTNTIATNIITQIPAVKGNFLFNGLVISGPGFTGGDLVRLNNSGNNIQNRGYIEVPIQFISTSTRYRVRVRYASVTPIRLSVNWGNSNIFSSIVPATATSLDNLQSRNFGYFESRNAFTSATGNVVGVRNFSENAGVIIDRFEFIPVTATFEHEYDLERAQE

SEQ ID NO: 180 - protein, 655 aa, Artificial Sequence
  Cry1B variant
MPSNRKNENEIINALSIPAVSNHSAQMDLSLDARIEDSLCIAEGNNINPLVSASTVQTGINIAGRILGVLGVPFAGQLASFYRFIVGELWPSGRDPWEIFMEHVEQLVRQHITMNARNTALARLQGLGASFRAYQQSLEDWLENRDNARTRSVLYTQYIALELDFLNAMPLFAINNQQVPLLMVYAQAANLHLLLLRDASLFGSEFGLTSQEIQRYYERQAEKTREYSDYCARWYNTGLNNLRGTNAESWLRYNQFRRDLTLGVLDLVALFPSYDTRIYPINTSAQLTREIYTDPIGRTNAPSGFASTNWFNNNAPSFSAIEAAIFRPPHLLDFPEQLTIYSASSRWSSTQHMNYWVGHRLNFRPIGGTLNTSTHGATNTSINPVTLQFTSRDVYRTESYAGINILLTTPVNGVPWARFNWRNPLNSLRGSLLYTIGYTGVGTQLFDSETELPPETTERPNYESYSHRLSNIRLIIGGTLRAPVYSWTHRSADRTNTIATNIITQIPAVKGNFLFNGLVISGPGFTGGDLVRLNNSGNNIQNRGYIEVPIQFISTSTRYRVRVRYASVTPIRLSVNWGNSNIFSSIVPATATSLDNLQSRNFGYFESRNAFTSATGNVVGVRNFSENAGVIIDRFEFIPVTATFEHEYDLERAQE

SEQ ID NO: 181 - protein, 655 aa, Artificial Sequence
  Cry1B variant
MPSNRKNENEIINALSIPAVSNHSAQMDLSLDARIEDSLCIAEGNNINPLVSASTVQTGINIAGRILGVLGVPFAGQLASFYSFIVGELWPSGRDPWEIFMEHVEHLVRQHITMNARNTALARLQGLGASFRAYQQSLEDWLENRDNARTRSVLYTQYIALELDFLNAMPLFAINNQQVPLLMVYAQAANLHLLLLRDASLFGSEFGLTSQEIQRYYERQAEKTREYSDYCARWYNTGLNNLRGTNAESWLRYNQFRRDLTLGVLDLVALFPSYDTRIYPINTSAQLTREIYTDPIGRTNAPSGFASTNWFNNNAPSFSAIEAAIFRPPHLLDFPEQLTIYSASSRWSSTQHMNYWVGHRLNFRPIGGTLNTSTHGATNTSINPVTLQFTSRDVYRTESYAGINILLTTPVNGVPWARFNWRNPLNSLRGSLLYTIGYTGVGTQLFDSETELPPETTERPNYESYSHRLSNIRLIIGGTLRAPVYSWTHRSADRTNTIATNIITQIPAVKGNFLFNGLVISGPGFTGGDLVRLNNSGNNIQNRGYIEVPIQFISTSTRYRVRVRYASVTPIRLSVNWGNSNIFSSIVPATATSLDNLQSRNFGYFESRNAFTSATGNVVGVRNFSENAGVIIDRFEFIPVTATFEHEYDLERAQE

SEQ ID NO: 182 - protein, 655 aa, Artificial Sequence
  Cry1B variant
MPSNRKNENEIINALSIPAVSNHSAQMDLSLDARIEDSLCIAEGNNINPLVSASTVQTGINIAGRILGVLGVPFAGQLASFYSFIVGELWPSGRDPWEIFMEHVEQLVRQHITMNARNTALARLQGLGASFRAYQQSLEDWLENRTNARTRSVLYTQYIALELDFLNAMPLFAINNQQVPLLMVYAQAANLHLLLLRDASLFGSEFGLTSQEIQRYYERQAEKTREYSDYCARWYNTGLNNLRGTNAESWLRYNQFRRDLTLGVLDLVALFPSYDTRIYPINTSAQLTREIYTDPIGRTNAPSGFASTNWFNNNAPSFSAIEAAIFRPPHLLDFPEQLTIYSASSRWSSTQHMNYWVGHRLNFRPIGGTLNTSTHGATNTSINPVTLQFTSRDVYRTESYAGINILLTTPVNGVPWARFNWRNPLNSLRGSLLYTIGYTGVGTQLFDSETELPPETTERPNYESYSHRLSNIRLIIGGTLRAPVYSWTHRSADRTNTIATNIITQIPAVKGNFLFNGLVISGPGFTGGDLVRLNNSGNNIQNRGYIEVPIQFISTSTRYRVRVRYASVTPIRLSVNWGNSNIFSSIVPATATSLDNLQSRNFGYFESRNAFTSATGNVVGVRNFSENAGVIIDRFEFIPVTATFEHEYDLERAQE

SEQ ID NO: 183 - protein, 655 aa, Artificial Sequence
  Cry1B variant
MPSNRKNENEIINALSIPAVSNHSAQMDLSLDARIEDSLCIAEGNNINPLVSASTVQTGINIAGRILGVLGVPFAGQLASFYSFIVGELWPSGRDPWEIFMEHVEQLVRQHITMNARNTALARLQGLGASFRAYQQSLEDWLENRDNARTRSVLYTQYIALELDFLNAMPLFAINNQQVPLLMVYAQAANLHLLLLRDASLFGSEFGLTSREIQRYYERQAEKTREYSDYCARWYNTGLNNLRGTNAESWLRYNQFRRDLTLGVLDLVALFPSYDTRIYPINTSAQLTREIYTDPIGRTNAPSGFASTNWFNNNAPSFSAIEAAIFRPPHLLDFPEQLTIYSASSRWSSTQHMNYWVGHRLNFRPIGGTLNTSTHGATNTSINPVTLQFTSRDVYRTESYAGINILLTTPVNGVPWARFNWRNPLNSLRGSLLYTIGYTGVGTQLFDSETELPPETTERPNYESYSHRLSNIRLIIGGTLRAPVYSWTHRSADRTNTIATNIITQIPAVKGNFLFNGLVISGPGFTGGDLVRLNNSGNNIQNRGYIEVPIQFISTSTRYRVRVRYASVTPIRLSVNWGNSNIFSSIVPATATSLDNLQSRNFGYFESRNAFTSATGNVVGVRNFSENAGVIIDRFEFIPVTATFEHEYDLERAQE

SEQ ID NO: 184 - protein, 655 aa, Artificial Sequence
  Cry1B variant
MPSNRKNENEIINALSIPAVSNHSAQMDLSLDARIEDSLCIAEGNNINPLVSASTVQTGINIAGRILGVLGVPFAGQLASFYSFIVGELWPSGRDPWEIFMEHVEQLVRQHITMNARNTALARLQGLGASFRAYQQSLEDWLENRDNARTRSVLYTQYIALELDFLNAMPLFAINNQQVPLLMVYAQAANLHLLLLRDASLFGSEFGLTSQEIQRYYERQVEKTREYSDYCARWYNTGLNNLRGTNAESWLRYNQFRRDLTLGVLDLVALFPSYDTRIYPINTSAQLTREIYTDPIGRTNAPSGFASTNWFNNNAPSFSAIEAAIFRPPHLLDFPEQLTIYSASSRWSSTQHMNYWVGHRLNFRPIGGTLNTSTHGATNTSINPVTLQFTSRDVYRTESYAGINILLTTPVNGVPWARFNWRNPLNSLRGSLLYTIGYTGVGTQLFDSETELPPETTERPNYESYSHRLSNIRLIIGGTLRAPVYSWTHRSADRTNTIATNIITQIPAVKGNFLFNGLVISGPGFTGGDLVRLNNSGNNIQNRGYIEVPIQFISTSTRYRVRVRYASVTPIRLSVNWGNSNIFSSIVPATATSLDNLQSRNFGYFESRNAFTSATGNVVGVRNFSENAGVIIDRFEFIPVTATFEHEYDLERAQE

SEQ ID NO: 185 - protein, 655 aa, Artificial Sequence
  Cry1B variant
MPSNRKNENEIINALSIPAVSNHSAQMDLSLDARIEDSLCIAEGNNINPLVSASTVQTGINIAGRILGVLGVPFAGQLASFYSFIVGELWPSGRDPWEIFMEHVEQLVRQHITMNARNTALARLQGLGASFRAYQQSLEDWLENRDNARTRSVLYTQYIALELDFLNAMPLFAINNQQVPLLMVYAQAANLHLLLLRDASLFGSEFGLTSQEIQRYYERQAEKTVEYSDYCARWYNTGLNNLRGTNAESWLRYNQFRRDLTLGVLDLVALFPSYDTRIYPINTSAQLTREIYTDPIGRTNAPSGFASTNWFNNNAPSFSAIEAAIFRPPHLLDFPEQLTIYSASSRWSSTQHMNYWVGHRLNFRPIGGTLNTSTHGATNTSINPVTLQFTSRDVYRTESYAGINILLTTPVNGVPWARFNWRNPLNSLRGSLLYTIGYTGVGTQLFDSETELPPETTERPNYESYSHRLSNIRLIIGGTLRAPVYSWTHRSADRTNTIATNIITQIPAVKGNFLFNGLVISGPGFTGGDLVRLNNSGNNIQNRGYIEVPIQFISTSTRYRVRVRYASVTPIRLSVNWGNSNIFSSIVPATATSLDNLQSRNFGYFESRNAFTSATGNVVGVRNFSENAGVIIDRFEFIPVTATFEHEYDLERAQE

SEQ ID NO: 186 - protein, 655 aa, Artificial Sequence
  Cry1B variant
MPSNRKNENEIINALSIPAVSNHSAQMDLSLDARIEDSLCIAEGNNINPLVSASTVQTGINIAGRILGVLGVPFAGQLASFYSFIVGELWPSGRDPWEIFMEHVEQLVRQHITMNARNTALARLQGLGASFRAYQQSLEDWLENRDNARTRSVLYTQYIALELDFLNAMPLFAINNQQVPLLMVYAQAANLHLLLLRDASLFGSEFGLTSQEIQRYYERQAEKTRDYSDYCARWYNTGLNNLRGTNAESWLRYNQFRRDLTLGVLDLVALFPSYDTRIYPINTSAQLTREIYTDPIGRTNAPSGFASTNWFNNNAPSFSAIEAAIFRPPHLLDFPEQLTIYSASSRWSSTQHMNYWVGHRLNFRPIGGTLNTSTHGATNTSINPVTLQFTSRDVYRTESYAGINILLTTPVNGVPWARFNWRNPLNSLRGSLLYTIGYTGVGTQLFDSETELPPETTERPNYESYSHRLSNIRLIIGGTLRAPVYSWTHRSADRTNTIATNIITQIPAVKGNFLFNGLVISGPGFTGGDLVRLNNSGNNIQNRGYIEVPIQFISTSTRYRVRVRYASVTPIRLSVNWGNSNIFSSIVPATATSLDNLQSRNFGYFESRNAFTSATGNVVGVRNFSENAGVIIDRFEFIPVTATFEHEYDLERAQE

SEQ ID NO: 187 - protein, 655 aa, Artificial Sequence
  Cry1B variant
MPSNRKNENEIINALSIPAVSNHSAQMDLSLDARIEDSLCIAEGNNINPLVSASTVQTGINIAGRILGVLGVPFAGQLASFYSFIVGELWPSGRDPWEIFMEHVEQLVRQHITMNARNTALARLQGLGASFRAYQQSLEDWLENRDNARTRSVLYTQYIALELDFLNAMPLFAINNQQVPLLMVYAQAANLHLLLLRDASLFGSEFGLTSQEIQRYYERQAEKTREYSDYCAKWYNTGLNNLRGTNAESWLRYNQFRRDLTLGVLDLVALFPSYDTRIYPINTSAQLTREIYTDPIGRTNAPSGFASTNWFNNNAPSFSAIEAAIFRPPHLLDFPEQLTIYSASSRWSSTQHMNYWVGHRLNFRPIGGTLNTSTHGATNTSINPVTLQFTSRDVYRTESYAGINILLTTPVNGVPWARFNWRNPLNSLRGSLLYTIGYTGVGTQLFDSETELPPETTERPNYESYSHRLSNIRLIIGGTLRAPVYSWTHRSADRTNTIATNIITQIPAVKGNFLFNGLVISGPGFTGGDLVRLNNSGNNIQNRGYIEVPIQFISTSTRYRVRVRYASVTPIRLSVNWGNSNIFSSIVPATATSLDNLQSRNFGYFESRNAFTSATGNVVGVRNFSENAGVIIDRFEFIPVTATFEHEYDLERAQE

SEQ ID NO: 188 - protein, 655 aa, Artificial Sequence
  Cry1B variant
MPSNRKNENEIINALSIPAVSNHSAQMDLSLDARIEDSLCIAEGNNINPLVSASTVQTGINIAGRILGVLGVPFAGQLASFYSFIVGELWPSGRDPWEIFMEHVEQLVRQHITMNARNTALARLQGLGASFRAYQQSLEDWLENRDNARTRSVLYTQYIALELDFLNAMPLFAINNQQVPLLMVYAQAANLHLLLLRDASLFGSEFGLTSQEIQRYYERQAEKTREYSDYCARRYNTGLNNLRGTNAESWLRYNQFRRDLTLGVLDLVALFPSYDTRIYPINTSAQLTREIYTDPIGRTNAPSGFASTNWFNNNAPSFSAIEAAIFRPPHLLDFPEQLTIYSASSRWSSTQHMNYWVGHRLNFRPIGGTLNTSTHGATNTSINPVTLQFTSRDVYRTESYAGINILLTTPVNGVPWARFNWRNPLNSLRGSLLYTIGYTGVGTQLFDSETELPPETTERPNYESYSHRLSNIRLIIGGTLRAPVYSWTHRSADRTNTIATNIITQIPAVKGNFLFNGLVISGPGFTGGDLVRLNNSGNNIQNRGYIEVPIQFISTSTRYRVRVRYASVTPIRLSVNWGNSNIFSSIVPATATSLDNLQSRNFGYFESRNAFTSATGNVVGVRNFSENAGVIIDRFEFIPVTATFEHEYDLERAQE

SEQ ID NO: 189 - protein, 655 aa, Artificial Sequence
  Cry1B variant
MPSNRKNENEIINALSIPAVSNHSAQMDLSLDARIEDSLCIAEGNNINPLVSASTVQTGINIAGRILGVLGVPFAGQLASFYSFIVGELWPSGRDPWEIFMEHVEQLVRQHITMNARNTALARLQGLGASFRAYQQSLEDWLENRDNARTRSVLYTQYIALELDFLNAMPLFAINNQQVPLLMVYAQAANLHLLLLRDASLFGSEFGLTSQEIQRYYERQAEKTREYSDYCARWYNTGLNNLRGTNASSWLRYNQFRRDLTLGVLDLVALFPSYDTRIYPINTSAQLTREIYTDPIGRTNAPSGFASTNWFNNNAPSFSAIEAAIFRPPHLLDFPEQLTIYSASSRWSSTQHMNYWVGHRLNFRPIGGTLNTSTHGATNTSINPVTLQFTSRDVYRTESYAGINILLTTPVNGVPWARFNWRNPLNSLRGSLLYTIGYTGVGTQLFDSETELPPETTERPNYESYSHRLSNIRLIIGGTLRAPVYSWTHRSADRTNTIATNIITQIPAVKGNFLFNGLVISGPGFTGGDLVRLNNSGNNIQNRGYIEVPIQFISTSTRYRVRVRYASVTPIRLSVNWGNSNIFSSIVPATATSLDNLQSRNFGYFESRNAFTSATGNVVGVRNFSENAGVIIDRFEFIPVTATFEHEYDLERAQE

SEQ ID NO: 190 - protein, 655 aa, Artificial Sequence
  Cry1B variant
MPSNRKNENEIINALSIPAVSNHSAQMDLSLDARIEDSLCIAEGNNINPLVSASTVQTGINIAGRILGVLGVPFAGQLASFYSFIVGELWPSGRDPWEIFMEHVEQLVRQHITYNARNTALARLQGLGASFRAYQQSLEDWLENRDNARTRSVLYTQYIALELDFLNAMPLFAINNQQVPLLMVYAQAANLHLLLLRDASLFGSEFGLTSQEIQRYYERQAEKTREYSDYCARWYNTGLNNLRGTNAESWLRYNQFRRDLTLGVLDLVALFPSYDTRIYPINTSAQLTREIYTDPIGRTNAPSGFASTNWFNNNAPSFSAIEAAIFRPPHLLDFPEQLTIYSASSRWSSTQHMNYWVGHRLNFRPIGGTLNTSTHGATNTSINPVTLQFTSRDVYRTESYAGINILLTTPVNGVPWARFNWRNPLNSLRGSLLYTIGYTGVGTQLFDSETELPPETTERPNYESYSHRLSNIRLIIGGTLRAPVYSWTHRSADRTNTIATNIITQIPAVKGNFLFNGLVISGPGFTGGDLVRLNNSGNNIQNRGYIEVPIQFISTSTRYRVRVRYASVTPIRLSVNWGNSNIFSSIVPATATSLDNLQSRNFGYFESRNAFTSATGNVVGVRNFSENAGVIIDRFEFIPVTATFEHEYDLERAQE

SEQ ID NO: 191 - protein, 655 aa, Artificial Sequence
  Cry1B variant
MPSNRKNENEIINALSIPAVSNHSAQMDLSLDARIEDSLCIAEGNNINPLVSASTVQTGINIAGRILGVLGVPFAGQLASFYSFIVGELWPSGRDPWEIFMEHVEQLVRQHITYNARNTALARLQGLGASFRAYQQSLEDWLENRDNARTRSVLYTQYIALELDFLNAMPLFAINNQQVPLLMVYAQAANLHLLLLRDASLFGSEFGLTSQEIQRYYERQAEKTREYSDYCARWYNTGLNNLRGQNAESWLRYNQFRRDLTLGVLDLVALFPSYDTRIYPINTSAQLTREIYTDPIGRTNAPSGFASTNWFNNNAPSFSAIEAAIFRPPHLLDFPEQLTIYSASSRWSSTQHMNYWVGHRLNFRPIGGTLNTSTHGATNTSINPVTLQFTSRDVYRTESYAGINILLTTPVNGVPWARFNWRNPLNSLRGSLLYTIGYTGVGTQLFDSETELPPETTERPNYESYSHRLSNIRLIIGGTLRAPVYSWTHRSADRTNTIATNIITQIPAVKGNFLFNGLVISGPGFTGGDLVRLNNSGNNIQNRGYIEVPIQFISTSTRYRVRVRYASVTPIRLSVNWGNSNIFSSIVPATATSLDNLQSRNFGYFESRNAFTSATGNVVGVRNFSENAGVIIDRFEFIPVTATFEHEYDLERAQE

SEQ ID NO: 192 - protein, 655 aa, Artificial Sequence
  Cry1B variant
MPSNRKNENEIINALSIPAVSNHSAQMDLSLDARIEDSLCIAEGNNINPLVSASTVQTGINIAGRILGVLGVPFAGQLASFYSFIVGELWPSGRDPWEIFMEHVEQLVRQHITYNARNTALARLQGLGASFRAYQQSLEDWLENRDNARTRSVLYTQYIALELDFLNAMPLFAINNQQVPLLMVYAQAANLHLLLLRDASLFGSEFGLTSQEIQRYYERQAEKTREYSDYCARWYNTGLNNLRGKNAESWLRYNQFRRDLTLGVLDLVALFPSYDTRIYPINTSAQLTREIYTDPIGRTNAPSGFASTNWFNNNAPSFSAIEAAIFRPPHLLDFPEQLTIYSASSRWSSTQHMNYWVGHRLNFRPIGGTLNTSTHGATNTSINPVTLQFTSRDVYRTESYAGINILLTTPVNGVPWARFNWRNPLNSLRGSLLYTIGYTGVGTQLFDSETELPPETTERPNYESYSHRLSNIRLIIGGTLRAPVYSWTHRSADRTNTIATNIITQIPAVKGNFLFNGLVISGPGFTGGDLVRLNNSGNNIQNRGYIEVPIQFISTSTRYRVRVRYASVTPIRLSVNWGNSNIFSSIVPATATSLDNLQSRNFGYFESRNAFTSATGNVVGVRNFSENAGVIIDRFEFIPVTATFEHEYDLERAQE

SEQ ID NO: 193 - protein, 655 aa, Artificial Sequence
  Cry1B variant
MPSNRKNENEIINALSIPAVSNHSAQMDLSLDARIEDSLCIAEGNNINPLVSASTVQTGINIAGRILGVLGVPFAGQLASFYSFIVGELWPSGRDPWEIFMEHVEQLVRQHITMNARNTALARLQGLGASFRAYQQSLEDWLENRDNARTRSVLYTQYIALELDFLNAMPLFAINNQQVPLLMVYAQAANLHLLLLRDASLFGSEFGLTSQEIQRYYERQAEKTREYSDYCARWYNTGLNNLRGKNAESWLRYNQFRRDLTLGVLDLVALFPSYDTRIYPINTSAQLTREIYTDPIGRTNAPSGFASTNWFNNNAPSFSAIEAAIFRPPHLLDFPEQLTIYSASSRWSSTQHMNYWVGHRLNFRPIGGTLNTSTHGATNTSINPVTLQFTSRDVYRTESYAGINILLTTPVNGVPWARFNWRNPLNSLRGSLLYTIGYTGVGTQLFDSETELPPETTERPNYESYSHRLSNIRLIIGGTLRAPVYSWTHRSADRTNTIATNIITQIPAVKGNFLFNGLVISGPGFTGGDLVRLNNSGNNIQNRGYIEVPIQFISTSTRYRVRVRYASVTPIRLSVNWGNSNIFSSIVPATATSLDNLQSRNFGYFESRNAFTSATGNVVGVRNFSENAGVIIDRFEFIPVTATFEHEYDLERAQE

SEQ ID NO: 194 - protein, 655 aa, Artificial Sequence
  Cry1B variant
MPSNRKNENEIINALSIPAVSNHSAQMDLSLDARIEDSLCIAEGNNINPLVSASTVQTGINIAGRILGVLGVPFAGQLASFYSFIVGELWPSGRDPWEIFMEHVEQLVRQHLTYNARNTALARLQGLGASFRAYQQSLEDWLENRDNARTRSVLYTQYIALELDFLNAMPLFAINNQQVPLLMVYAQAANLHLLLLRDASLFGSEFGLTSQEIQRYYERQAEKTREYSDYCARWYNTGLNNLRGHNAESWLRYNQFRRDLTLGVLDLVALFPSYDTRIYPINTSAQLTREIYTDPIGRTNAPSGFASTNWFNNNAPSFSAIEAAIFRPPHLLDFPEQLTIYSASSRWSSTQHMNYWVGHRLNFRPIGGTLNTSTHGATNTSINPVTLQFTSRDVYRTESYAGINILLTTPVNGVPWARFNWRNPLNSLRGSLLYTIGYTGVGTQLFDSETELPPETTERPNYESYSHRLSNIRLIIGGTLRAPVYSWTHRSADRTNTIATNIITQIPAVKGNFLFNGLVISGPGFTGGDLVRLNNSGNNIQNRGYIEVPIQFISTSTRYRVRVRYASVTPIRLSVNWGNSNIFSSIVPATATSLDNLQSRNFGYFESRNAFTSATGNVVGVRNFSENAGVIIDRFEFIPVTATFEHEYDLERAQE

SEQ ID NO: 195 - protein, 655 aa, Artificial Sequence
  Cry1B variant
MPSNRKNENEIINALSIPAVSNHSAQMDLSLDARIEDSLCIAEGNNINPLVSASTVQTGINIAGRILGVLGVPFAGQLASFYSFIVGELWPSGRDPWEIFMEHVEQLVRQHLTYNARNTALARLQGLGASFRAYQQSLEDWLENRDNARTRSVLYTQYIALELDFLNAMPLFAINNQQVPLLMVYAQAANLHLLLLRDASLFGSEFGLTRQEIQRYYERQAEKTREYSDYCARWYNTGLNNLRGHNAESWLRYNQFRRDLTLGVLDLVALFPSYDTRIYPINTSAQLTREIYTDPIGRTNAPSGFASTNWFNNNAPSFSAIEAAIFRPPHLLDFPEQLTIYSASSRWSSTQHMNYWVGHRLNFRPIGGTLNTSTHGATNTSINPVTLQFTSRDVYRTESYAGINILLTTPVNGVPWARFNWRNPLNSLRGSLLYTIGYTGVGTQLFDSETELPPETTERPNYESYSHRLSNIRLIIGGTLRAPVYSWTHRSADRTNTIATNIITQIPAVKGNFLFNGLVISGPGFTGGDLVRLNNSGNNIQNRGYIEVPIQFISTSTRYRVRVRYASVTPIRLSVNWGNSNIFSSIVPATATSLDNLQSRNFGYFESRNAFTSATGNVVGVRNFSENAGVIIDRFEFIPVTATFEHEYDLERAQE

SEQ ID NO: 196 - protein, 655 aa, Artificial Sequence
  Cry1B variant
MPSNRKNENEIINALSIPAVSNHSAQMDLSLDARIEDSLCIAEGNNINPLVSASTVQTGINIAGRILGVLGVPFAGQLASFYSFLVGELWPSGRDPWEIFLEHVEQLIRQQVTENTRNTAIARLEGLGRGYRSYQQALETWLDNRNDARSRSIILERYVALELDITTAIPLFRIRNEEVPLLMVYAQAANLHLLLLRDASLFGSEWGMASSDVNQYYQEQIRYTEEYSNHCVQWYNTGLNNLRGTNAESWLRYNQFRRDLTLGVLDLVALFPSYDTRTYPINTSAQLTREIYTDPIGRTNAPSGFASTNWFNNNAPSFSAIEAAVIRPPHLLDFPEQLTIFSVLSRWSNTQYMNYWVGHRLESRTIRGSLSTSTHGNTNTSINPVTLQFTSRDVYRTESYAGINILLTTPVNGVPWARFNWRNPLNSLRGSLLYTIGYTGVGTQLFDSETELPPETTERPNYESYSHRLSNIRLISGNTLRAPVYSWTHRSADRTNTIATNIITQIPAVKGNFLFNGSVISGPGFTGGDLVRLNNSGNNIQNRGYLEVPIQFISTSTRYRVRVRYASVTPIQLSVNWGNSNIFSSIVPATATSLDNLQSRDFGYFESTNAFTSATGNVVGVRNFSENAGVIIDRFEFIPVTATFEAEYDLERAQE

SEQ ID NO: 197 - protein, 657 aa, Artificial Sequence
  Cry1B variant
MTSNRKNENEIINALSIPAVSNHSAQMDLSPDARIEDSLCIAEGNNINPLVSASTVQTGINIAGRILGVLGVPFAGQLASFYSFIVGELWPSGRDPWEIFLEHVEQLVRQQITENARNTALARLQGLGASFRAYQQSLEDWLENRDDARTRSVLYTQYIALELDFLNAMPLFAINNQQVPLLMVYAQAANLHLLLLRDASLFGSEFGLTSQEIQRYYERQAEKTREYSDYCARWYNTGLNNLRGTNAESWLRYNQFRRDLTLGVLDLVALFPSYDTRIYPINTSAQLTREIYTDPIGRTNAPSGFASTNWFNNNAPSFSAIEAAIFRPPHLLDFPEQLTIYSASSRWSSTQHMNYWVGHRLNFRPIGGTLNTSTQGLTNNTSINPVTLQFTSRDVYRTESNAGTNILFTTPVNGVPWARFNFINPQNIYERGATTYSQPYQGVGIQLFDSETELPPETTERPNYESYSHRLSHIGLIIGNTLRAPVYSWTHRSADRTNTIATNIITQIPAVKGNFLFNGSVISGPGFTGGDLVRLNNSGNNIQNRGYLEVPIQFISTSTRYRVRVRYASVTPIQLSVNWGNSNIFSSIVPATATSLDNLQSRDFGYFESTNAFTSATGNVVGVRNFSENAGVIIDRFEFIPVTATFEAEYDLERAQE

SEQ ID NO: 198 - protein, 655 aa, Artificial Sequence
  Cry1B variant
MTSNRKNENEIINALSIPAVSNHSAQMDLSPDARIEDSLCIAEGNNINPLVSASTVQTGINIAGRILGVLGVPFAGQLASFYSFIVGELWPSGRDPWEIFLEHVEQLIRQQVTENTRNTAIARLEGLGRGYRSYQQALETWLDNRNDARSRSIILERYVALELDITTAIPLFRIRNEEVPLLMVYAQAANLHLLLLRDASLFGSEWGMASSDVNQYYQEQIRYTEEYSNHCVQWYNTGLNNLRGTNAESWLRYNQFRRDLTLGVLDLVALFPSYDTRIYPINTSAQLTREIYTDPIGRTNAPSGFASTNWFNNNAPSFSAIEAAVIRPPHLLDFPEQLTIFSVLSRWSNTQYMNYWVGHRLESRTIRGSLSTSTHGNTNTSINPVTLQFTSRDVYRTESYAGINILLTTPVNGVPWARFNWRNPLNSLRGSLLYTIGYTGVGTQLFDSETELPPETTERPNYESYSHRLSNIRLISGNTLRAPVYSWTHRSADRTNTIATNIITQIPAVKGNFLFNGSVISGPGFTGGDLVRLNNSGNNIQNRGYLEVPIQFISTSTRYRVRVRYASVTPIQLSVNWGNSNIFSSIVPATATSLDNLQSRDFGYFESTNAFTSATGNVVGVRNFSENAGVIIDRFEFIPVTATFEAEYDLERAQE

SEQ ID NO: 199 - protein, 657 aa, Artificial Sequence
  Cry1B variant
MPSNRKNENEIINALSIPAVSNHSAQMDLSLDARIEDSLCIAEGNNINPLVSASTVQTGINIAGRILGVLGVPFAGQLASFYSFLVGELWPSGRDPWEIFLEHVEQLVRQQITENARNTALARLQGLGASFRAYQQSLEDWLENRDDARTRSVLYTQYIALELDFLNAMPLFAINNQQVPLLMVYAQAANLHLLLLRDASLFGSEFGLTSQEIQRYYERQAEKTREYSDYCARWYNTGLNNLRGTNAESWLRYNQFRRDLTLGVLDLVALFPSYDTRTYPINTSAQLTREIYTDPIGRTNAPSGFASTNWFNNNAPSFSAIEAAIFRPPHLLDFPEQLTIYSASSRWSSTQHMNYWVGHRLNFRPIGGTLNTSTQGLTNNTSINPVTLQFTSRDVYRTESNAGTNILFTTPVNGVPWARFNFINPQNIYERGATTYSQPYQGVGIQLFDSETELPPETTERPNYESYSHRLSHIGLIIGNTLRAPVYSWTHRSADRTNTIGPNRITQIPAVKGRFLFNGSVISGPGFTGGDVVRLNRNNGNIQNRGYIEVPIQFTSTSTRYRVRVRYASVTSIELNVNLGNSSIFTNTLPATAASLDNLQSGDFGYVEINNAFTSATGNIVGARNFSANAEVIIDRFEFIPVTATFEAEYDLERAQK

SEQ ID NO: 200 - protein, 654 aa, Artificial Sequence
  Cry1B variant
TSNRKNENEIINALSIPAVSNHSAQMDLSPDARIEDSLCIAEGNNINPLVSASTVQTGINIAGRILGVLGVPFAGQLASFYSFIVGELWPSGRDPWEIFLEHVEQLVRQQVTENTRNTAIARLEGLGRGYRSYQQALETWLDNRDDARTRSVLYTQYIALELDFLNAMPLFAINNQQVPLLMVYAQAANLHLLLLRDASLFGSEFGLTSQEIQRYYERQAEKTREYSDYCARWYNTGLNNLRGTNAESWLRYNQFRRDLTLGVLDLVALFPSYDTRIYPINTSAQLTREIYTDPIGRTNAPSGFASTNWFNNNAPSFSAIEAAVIRPPHLLDFPEQLTIFSVLSRWSNTQYMNYWVGHRLESRTIRGSLSTSTHGNTNTSINPVTLQFTSRDVYRTESYAGINILLTTPVNGVPWARFNWRNPLNSLRGSLLYTIGYTGVGTQLFDSETELPPETTERPNYESYSHRLSNIRLISGNTLRAPVYSWTHRSADRTNTIATNIITQIPAVKGNFLFNGSVISGPGFTGGDLVRLNNSGNNIQNRGYLEVPIQFISTSTRYRVRVRYASVTPIQLSVNWGNSNIFSSIVPATATSLDNLQSRDFGYFESTNAFTSATGNVVGVRNFSENAGVIIDRFEFIPVTATFEAEYDLERAQE

SEQ ID NO: 201 - protein, 655 aa, Artificial Sequence
  Cry1B variant
MTSNRKNENEIINALSIPAVSNHSAQMDLSPDARIEDSLCIAEGNNINPLVSASTVQTGINIAGRILGVLGVPFAGQLASFYSFIVGELWPSGRDPWEIFLEHVEQLVRQQITENARNTALARLQGLGASFRAYQQSLEDWLENRNDARSRSIILERYVALELDITTAIPLFRIRNEEVPLLMVYAQAANLHLLLLRDASLFGSEFGLTSQEIQRYYERQAEKTREYSDYCARWYNTGLNNLRGTNAESWLRYNQFRRDLTLGVLDLVALFPSYDTRIYPINTSAQLTREIYTDPIGRTNAPSGFASTNWFNNNAPSFSAIEAAVIRPPHLLDFPEQLTIFSVLSRWSNTQYMNYWVGHRLESRTIRGSLSTSTHGNTNTSINPVTLQFTSRDVYRTESYAGINILLTTPVNGVPWARFNWRNPLNSLRGSLLYTIGYTGVGTQLFDSETELPPETTERPNYESYSHRLSNIRLISGNTLRAPVYSWTHRSADRTNTIATNIITQIPAVKGNFLFNGSVISGPGFTGGDLVRLNNSGNNIQNRGYLEVPIQFISTSTRYRVRVRYASVTPIQLSVNWGNSNIFSSIVPATATSLDNLQSRDFGYFESTNAFTSATGNVVGVRNFSENAGVIIDRFEFIPVTATFEAEYDLERAQE

SEQ ID NO: 202 - protein, 655 aa, Artificial Sequence
  Cry1B variant
MTSNRKNENEIINALSIPAVSNHSAQMDLSPDARIEDSLCIAEGNNINPLVSASTVQTGINIAGRILGVLGVPFAGQLASFYSFIVGELWPSGRDPWEIFLEHVEQLVRQQITENARNTALARLQGLGASFRAYQQSLEDWLENRDDARTRSVLYTQYIALELDFLNAMPLFAINNQQVPLLMVYAQAANLHLLLLRDASLFGSEWGMASSDVNQYYQEQIRYTEEYSNHCVQWYNTGLNNLRGTNAESWLRYNQFRRDLTLGVLDLVALFPSYDTRIYPINTSAQLTREIYTDPIGRTNAPSGFASTNWFNNNAPSFSAIEAAVIRPPHLLDFPEQLTIFSVLSRWSNTQYMNYWVGHRLESRTIRGSLSTSTHGNTNTSINPVTLQFTSRDVYRTESYAGINILLTTPVNGVPWARFNWRNPLNSLRGSLLYTIGYTGVGTQLFDSETELPPETTERPNYESYSHRLSNIRLISGNTLRAPVYSWTHRSADRTNTIATNIITQIPAVKGNFLFNGSVISGPGFTGGDLVRLNNSGNNIQNRGYLEVPIQFISTSTRYRVRVRYASVTPIQLSVNWGNSNIFSSIVPATATSLDNLQSRDFGYFESTNAFTSATGNVVGVRNFSENAGVIIDRFEFIPVTATFEAEYDLERAQE

SEQ ID NO: 203 - protein, 655 aa, Artificial Sequence
  Cry1B variant
MTSNRKNENEIINALSIPAVSNHSAQMDLSPDARIEDSLCIAEGNNINPLVSASTVQTGINIAGRILGVLGVPFAGQLASFYSFIVGELWPSGRDPWEIFLEHVEQLVRQQVTENTRNTAIARLEGLGRGYRSYQQALETWLDNRNDARSRSIILERYVALELDITTAIPLFRIRNEEVPLLMVYAQAANLHLLLLRDASLFGSEFGLTSQEIQRYYERQAEKTREYSDYCARWYNTGLNNLRGTNAESWLRYNQFRRDLTLGVLDLVALFPSYDTRIYPINTSAQLTREIYTDPIGRTNAPSGFASTNWFNNNAPSFSAIEAAVIRPPHLLDFPEQLTIFSVLSRWSNTQYMNYWVGHRLESRTIRGSLSTSTHGNTNTSINPVTLQFTSRDVYRTESYAGINILLTTPVNGVPWARFNWRNPLNSLRGSLLYTIGYTGVGTQLFDSETELPPETTERPNYESYSHRLSNIRLISGNTLRAPVYSWTHRSADRTNTIATNIITQIPAVKGNFLFNGSVISGPGFTGGDLVRLNNSGNNIQNRGYLEVPIQFISTSTRYRVRVRYASVTPIQLSVNWGNSNIFSSIVPATATSLDNLQSRDFGYFESTNAFTSATGNVVGVRNFSENAGVIIDRFEFIPVTATFEAEYDLERAQE

SEQ ID NO: 204 - protein, 655 aa, Artificial Sequence
  Cry1B variant
MTSNRKNENEIINALSIPAVSNHSAQMDLSPDARIEDSLCIAEGNNINPLVSASTVQTGINIAGRILGVLGVPFAGQLASFYSFIVGELWPSGRDPWEIFLEHVEQLVRQQITENARNTALARLQGLGASFRAYQQSLEDWLENRNDARSRSIILERYVALELDITTAIPLFRIRNEEVPLLMVYAQAANLHLLLLRDASLFGSEWGMASSDVNQYYQEQIRYTEEYSNHCVQWYNTGLNNLRGTNAESWLRYNQFRRDLTLGVLDLVALFPSYDTRIYPINTSAQLTREIYTDPIGRTNAPSGFASTNWFNNNAPSFSAIEAAVIRPPHLLDFPEQLTIFSVLSRWSNTQYMNYWVGHRLESRTIRGSLSTSTHGNTNTSINPVTLQFTSRDVYRTESYAGINILLTTPVNGVPWARFNWRNPLNSLRGSLLYTIGYTGVGTQLFDSETELPPETTERPNYESYSHRLSNIRLISGNTLRAPVYSWTHRSADRTNTIATNIITQIPAVKGNFLFNGSVISGPGFTGGDLVRLNNSGNNIQNRGYLEVPIQFISTSTRYRVRVRYASVTPIQLSVNWGNSNIFSSIVPATATSLDNLQSRDFGYFESTNAFTSATGNVVGVRNFSENAGVIIDRFEFIPVTATFEAEYDLERAQE

SEQ ID NO: 205 - protein, 655 aa, Artificial Sequence
  Cry1B variant
MTSNRKNENEIINALSIPAVSNHSAQMDLSPDARIEDSLCIAEGNNINPLVSASTVQTGINIAGRILGVLGVPFAGQLASFYSFIVGELWPSGRDPWEIFLEHVEQLVRQQVTENTRNTAIARLEGLGRGYRSYQQALETWLDNRDDARTRSVLYTQYIALELDFLNAMPLFAINNQQVPLLMVYAQAANLHLLLLRDASLFGSEWGMASSDVNQYYQEQIRYTEEYSNHCVQWYNTGLNNLRGTNAESWLRYNQFRRDLTLGVLDLVALFPSYDTRIYPINTSAQLTREIYTDPIGRTNAPSGFASTNWFNNNAPSFSAIEAAVIRPPHLLDFPEQLTIFSVLSRWSNTQYMNYWVGHRLESRTIRGSLSTSTHGNTNTSINPVTLQFTSRDVYRTESYAGINILLTTPVNGVPWARFNWRNPLNSLRGSLLYTIGYTGVGTQLFDSETELPPETTERPNYESYSHRLSNIRLISGNTLRAPVYSWTHRSADRTNTIATNIITQIPAVKGNFLFNGSVISGPGFTGGDLVRLNNSGNNIQNRGYLEVPIQFISTSTRYRVRVRYASVTPIQLSVNWGNSNIFSSIVPATATSLDNLQSRDFGYFESTNAFTSATGNVVGVRNFSENAGVIIDRFEFIPVTATFEAEYDLERAQE

SEQ ID NO: 206 - protein, 657 aa, Artificial Sequence
  Cry1B variant
MPSNRKNENEIINALSIPAVSNHSAQMDLSLDARIEDSLCIAEGNNINPLVSASTVQTGINIAGRILGVLGVPFAGQLASFYSFLVGELWPSGRDPWEIFLEHVEQLVRQQITENARNTALARLQGLGASFRAYQQSLEDWLENRDDARSRSIILERYVALELDITTAIPLFRIRNEEVPLLMVYAQAANLHLLLLRDASLFGSEWGMASSDVNQYYQEQIRYTEEYSNHCVQWYNTGLNNLRGTNAESWLRYNQFRRDLTLGVLDLVALFPSYDTRTYPINTSAQLTREIYTDPIGRTNAPSGFASTNWFNNNAPSFSAIEAAIFRPPHLLDFPEQLTIYSASSRWSSTQHMNYWVGHRLNFRPIGGTLNTSTQGLTNNTSINPVTLQFTSRDVYRTESNAGTNILFTTPVNGVPWARFNFINPQNIYERGATTYSQPYQGVGIQLFDSETELPPETTERPNYESYSHRLSHIGLIIGNTLRAPVYSWTHRSADRTNTIGPNRITQIPAVKGRFLFNGSVISGPGFTGGDVVRLNRNNGNIQNRGYIEVPIQFTSTSTRYRVRVRYASVTSIELNVNLGNSSIFTNTLPATAASLDNLQSGDFGYVEINNAFTSATGNIVGARNFSANAEVIIDRFEFIPVTATFEAEYDLERAQK

SEQ ID NO: 207 - protein, 657 aa, Artificial Sequence
  Cry1B variant
MPSNRKNENEIINALSIPAVSNHSAQMDLSLDARIEDSLCIAEGNNINPLVSASTVQTGINIAGRILGVLGVPFAGQLASFYSFLVGELWPSGRDPWEIFLEHVEQLIRQQVTENTRNTAIARLEGLGRGYRSYQQALETWLDNRNDARTRSVLYTQYIALELDFLNAMPLFAINNQQVPLLMVYAQAANLHLLLLRDASLFGSEWGMASSDVNQYYQEQIRYTEEYSNHCVQWYNTGLNNLRGTNAESWLRYNQFRRDLTLGVLDLVALFPSYDTRTYPINTSAQLTREIYTDPIGRTNAPSGFASTNWFNNNAPSFSAIEAAIFRPPHLLDFPEQLTIYSASSRWSSTQHMNYWVGHRLNFRPIGGTLNTSTQGLTNNTSINPVTLQFTSRDVYRTESNAGTNILFTTPVNGVPWARFNFINPQNIYERGATTYSQPYQGVGIQLFDSETELPPETTERPNYESYSHRLSHIGLIIGNTLRAPVYSWTHRSADRTNTIGPNRITQIPAVKGRFLFNGSVISGPGFTGGDVVRLNRNNGNIQNRGYIEVPIQFTSTSTRYRVRVRYASVTSIELNVNLGNSSIFTNTLPATAASLDNLQSGDFGYVEINNAFTSATGNIVGARNFSANAEVIIDRFEFIPVTATFEAEYDLERAQK

SEQ ID NO: 208 - protein, 657 aa, Artificial Sequence
  Cry1B variant
MPSNRKNENEIINALSIPAVSNHSAQMDLSLDARIEDSLCIAEGNNINPLVSASTVQTGINIAGRILGVLGVPFAGQLASFYSFLVGELWPSGRDPWEIFLEHVEQLIRQQVTENTRNTAIARLEGLGRGYRSYQQALETWLDNRNDARSRSIILERYVALELDITTAIPLFRIRNEEVPLLMVYAQAANLHLLLLRDASLFGSEFGLTSQEIQRYYERQAEKTREYSDYCARWYNTGLNNLRGTNAESWLRYNQFRRDLTLGVLDLVALFPSYDTRTYPINTSAQLTREIYTDPIGRTNAPSGFASTNWFNNNAPSFSAIEAAIFRPPHLLDFPEQLTIYSASSRWSSTQHMNYWVGHRLNFRPIGGTLNTSTQGLTNNTSINPVTLQFTSRDVYRTESNAGTNILFTTPVNGVPWARFNFINPQNIYERGATTYSQPYQGVGIQLFDSETELPPETTERPNYESYSHRLSHIGLIIGNTLRAPVYSWTHRSADRTNTIGPNRITQIPAVKGRFLFNGSVISGPGFTGGDVVRLNRNNGNIQNRGYIEVPIQFTSTSTRYRVRVRYASVTSIELNVNLGNSSIFTNTLPATAASLDNLQSGDFGYVEINNAFTSATGNIVGARNFSANAEVIIDRFEFIPVTATFEAEYDLERAQK

SEQ ID NO: 209 - protein, 657 aa, Artificial Sequence
  Cry1B variant
MPSNRKNENEIINALSIPAVSNHSAQMDLSLDARIEDSLCIAEGNNINPLVSASTVQTGINIAGRILGVLGVPFAGQLASFYSFLVGELWPSGRDPWEIFLEHVEQLVRQQITENARNTALARLQGLGASFRAYQQSLEDWLENRDDARTRSVLYTQYIALELDFLNAMPLFAINNQQVPLLMVYAQAANLHLLLLRDASLFGSEWGMASSDVNQYYQEQIRYTEEYSNHCVQWYNTGLNNLRGTNAESWLRYNQFRRDLTLGVLDLVALFPSYDTRTYPINTSAQLTREIYTDPIGRTNAPSGFASTNWFNNNAPSFSAIEAAIFRPPHLLDFPEQLTIYSASSRWSSTQHMNYWVGHRLNFRPIGGTLNTSTQGLTNNTSINPVTLQFTSRDVYRTESNAGTNILFTTPVNGVPWARFNFINPQNIYERGATTYSQPYQGVGIQLFDSETELPPETTERPNYESYSHRLSHIGLIIGNTLRAPVYSWTHRSADRTNTIGPNRITQIPAVKGRFLFNGSVISGPGFTGGDVVRLNRNNGNIQNRGYIEVPIQFTSTSTRYRVRVRYASVTSIELNVNLGNSSIFTNTLPATAASLDNLQSGDFGYVEINNAFTSATGNIVGARNFSANAEVIIDRFEFIPVTATFEAEYDLERAQK

SEQ ID NO: 210 - protein, 657 aa, Artificial Sequence
  Cry1B variant
MPSNRKNENEIINALSIPAVSNHSAQMDLSLDARIEDSLCIAEGNNINPLVSASTVQTGINIAGRILGVLGVPFAGQLASFYSFLVGELWPSGRDPWEIFLEHVEQLIRQQVTENTRNTAIARLEGLGRGYRSYQQALETWLDNRNDARTRSVLYTQYIALELDFLNAMPLFAINNQQVPLLMVYAQAANLHLLLLRDASLFGSEFGLTSQEIQRYYERQAEKTREYSDYCARWYNTGLNNLRGTNAESWLRYNQFRRDLTLGVLDLVALFPSYDTRTYPINTSAQLTREIYTDPIGRTNAPSGFASTNWFNNNAPSFSAIEAAIFRPPHLLDFPEQLTIYSASSRWSSTQHMNYWVGHRLNFRPIGGTLNTSTQGLTNNTSINPVTLQFTSRDVYRTESNAGTNILFTTPVNGVPWARFNFINPQNIYERGATTYSQPYQGVGIQLFDSETELPPETTERPNYESYSHRLSHIGLIIGNTLRAPVYSWTHRSADRTNTIGPNRITQIPAVKGRFLFNGSVISGPGFTGGDVVRLNRNNGNIQNRGYIEVPIQFTSTSTRYRVRVRYASVTSIELNVNLGNSSIFTNTLPATAASLDNLQSGDFGYVEINNAFTSATGNIVGARNFSANAEVIIDRFEFIPVTATFEAEYDLERAQK

SEQ ID NO: 211 - protein, 657 aa, Artificial Sequence
  Cry1B variant
MPSNRKNENEIINALSIPAVSNHSAQMDLSLDARIEDSLCIAEGNNINPLVSASTVQTGINIAGRILGVLGVPFAGQLASFYSFLVGELWPSGRDPWEIFLEHVEQLVRQQITENARNTALARLQGLGASFRAYQQSLEDWLENRDDARSRSIILERYVALELDITTAIPLFRIRNEEVPLLMVYAQAANLHLLLLRDASLFGSEFGLTSQEIQRYYERQAEKTREYSDYCARWYNTGLNNLRGTNAESWLRYNQFRRDLTLGVLDLVALFPSYDTRTYPINTSAQLTREIYTDPIGRTNAPSGFASTNWFNNNAPSFSAIEAAIFRPPHLLDFPEQLTIYSASSRWSSTQHMNYWVGHRLNFRPIGGTLNTSTQGLTNNTSINPVTLQFTSRDVYRTESNAGTNILFTTPVNGVPWARFNFINPQNIYERGATTYSQPYQGVGIQLFDSETELPPETTERPNYESYSHRLSHIGLIIGNTLRAPVYSWTHRSADRTNTIGPNRITQIPAVKGRFLFNGSVISGPGFTGGDVVRLNRNNGNIQNRGYIEVPIQFTSTSTRYRVRVRYASVTSIELNVNLGNSSIFTNTLPATAASLDNLQSGDFGYVEINNAFTSATGNIVGARNFSANAEVIIDRFEFIPVTATFEAEYDLERAQK

SEQ ID NO: 212 - DNA, 3501 bp, Bacillus thuringiensis
atggagatcaacaatcagaagcagtgcatcccatacaactgtctgtctaaccccgaagaggtcctccttgatggtgagcgtatccttcccgacattgatccactggaggttagtctctcactcctccagttcttgctcaacaacttcgtgccaggaggtggcttcatctccggattggttgacaagatctggggcgcattgagaccctcagagtgggacctgttcctcgctcagatcgagcgcttgatcgaccagaggattgaggctaccgtcagagccaaggctatcactgagctggagggactgggtaggaactaccagatctatgccgaggctttcaaggagtgggactctgaccctgacaacgaggctgcaaagtctcgcgtgatcgacaggttccgtatcctcgatgggcttatcgaggccaacatcccttccttccgtatcatcgagttcgaggtcccactgctgtccgtctatgtccaagcagccaacttgcacctcgcattgctcagggactctgtgatctttggcgaaaggtggggattgactaccaagaacgtgaacgacatctacaaccgccagatccgcgagatccacgagtactccaaccactgcgtcgacacctacaacaccgagctggagagactcggctttcgctcaatcgctcagtggcgcatctacaaccagttccgtagggagctgactctcaccgtcttggacatcgtcgcactgtttcccaactacgactctaggctgtaccctatccagaccttctcccagcttactagggagatcgtgaccagtccagtctcagagttctactacggtgtcatcaactccgggaacatcatcggtaccctcactgagcagcagatccgcagacctcacttgatggacttcttcaactccatgatcatgtacacctccgacaaccgtaaggagcactactggagtggactggagatgactgcctactttaccggattcgcaggtgcacaagtgtccttcccactggtcggtacacgtggagaatccgcacctccacttactgtcaggtctgtcaacgacggcatctaccgtatcctctcagctcccttctactcagcacccttccttggaaccatcgtccttggatcacgcggtgagaagttcgacttcgcactgaacaacatctcccctccaccttccaccatctacagacaccctggaactgtggactcacttgtctctatcccacctcaggacaactccgttccacctcacagaggatcttcccaccgtctgagtcacgtgactatgagagcctccagtcccatctttcactggacccacagatctgctaccaccaccaacaccatcaaccccaacgccatcatccagatacccttggtcaaggccttcaacctgcactctggagctacagttgttcgcggaccaggcttcactggtggagacatcttgaggcgtaccaacaccgggacattcgcagacatgcgtgtgaacatcaccggaccactgtctcagaggtatagggtgaggattcgctatgccagtaccactgacctccagttcttcaccaggatcaacggtaccaccgtcaacatcggcaacttcaccaggaccatgaactctggagacaacctggaatccgggaacttccgtactgcagggttctccactcccttcagcttctccaacgcacagtcaaccttcactctgggtacacagcctttctccaaccaggaggtgtacatcgataggatcgagtttgtgccagctgaggtgaccttcgaagccgagtctgaccttgagcgtgctcagaaagccgtgaacgcactgttcacttccaccaaccagctcggtctgaagaccgatgtgactgactaccagatcgaccaggtctcaaacctggttgagtgccttagtgacgagttctgcttggacgagaagcgtgagctgtctgagaaggtcaagcacgctaaacgcctgtccgacaagcgcaatctcctgcaagaccccaacttcacctccatcaaccgtcaactcgatcgtggttggcgtggatcaactgacatcaccatccaaggtgggaacgacgtcttcaaggagaactacgttaccttgccaggtaccttcgacgagtgctaccctacctacctgtaccagatcatcgacgagtctaagctgaaggcctacactcgctatgaactgagagggtacatcgaggactcccaggacctcgaagtctacctgatccgctacaacgccaagcacgagaccgtcaatgttcctgggacaggatctctgtggcctctgtccgttgagagtcctataggcagatgtggtgagcctaaccgatgcgttcctcacattgagtggaaccctgacctggactgttcatgtcgtgacggagagaagtgtgctcaccactcacaccacttctccttggacattgacgtcggatgcactgacctcaatgaggacttgggagtctgggtgatcttcaagatcaagacccaggacggtcacgctaggttgggtaacctcgaattcctggaggagaagccattgctcggtgaagcattggctcgcgtcaaacgcgctgagaagaagtggcgtgacaaacgtgagcagctccagttcgagaccaacatcgtctacaaggaggctaaggagtcagtggatgccctcttcgtggactcccactacaatcgtctgcaagccgacaccaacatcaccatgatccacgctgcagacaaacgtgtccacaggatcagggaagcttacttgccagagttgtccgtgataccaggtgtgaatgctgacatcttcgaggagctggaaggactgatcttcacagccttcagtctctacgacgctcgcaacatcatcaagaacggcgacttcaacaacggtctctcctgctggaacgtcaagggtcacgtggacattcagcagaacgaccacagatctgttctggtcgtgcctgaatgggagtccgaggtctcacaggaagtgcgtgtttgcccaggtagagggtacattctcagggtgactgcttacaaggagggctatggcgaaggatgcgtgaccatacacgagatcgaggacaacaccgacgagctgaagttctccaactgcatcgaggaggaggtttaccctactgacactggcaacgactacactgctcaccagggtactactggatgtgcagacgcttgcaactcccgtaacgtcggctacgaggacggttacgagatcaacaccactgccagtgtcaactacaagcctacctacgaggaggagatgtacaccgatgtgaggagggacaaccactgcgagtacgacagagggtatggtaaccacacaccactgcctgctgggtatgtgaccaaggagctggagtacttccctgaaaccgacactgtgtggatagagatcggtgagactgaaggcaccttcatcgtggattccgtcgagctgctccttatggaggag

SEQ ID NO: 213 - protein, 1167 aa, Bacillus thuringiensis
MEINNQKQCIPYNCLSNPEEVLLDGERILPDIDPLEVSLSLLQFLLNNFVPGGGFISGLVDKIWGALRPSEWDLFLAQIERLIDQRIEATVRAKAITELEGLGRNYQIYAEAFKEWESDPDNEAAKSRVIDRFRILDGLIEANIPSFRIIEFEVPLLSVYVQAANLHLALLRDSVIFGERWGLTTKNVNDIYNRQIREIHEYSNHCVDTYNTELERLGFRSIAQWRIYNQFRRELTLTVLDIVALFPNYDSRLYPIQTFSQLTREIVTSPVSEFYYGVINSGNIIGTLTEQQIRRPHLMDFFNSMIMYTSDNRREHYWSGLEMTAYFTGFAGAQVSFPLVGTRGESAPPLTVRSVNDGIYRILSAPFYSAPFLGTIVLGSRGEKFDFALNNISPPPSTIYRHPGTVDSLVSIPPQDNSVPPHRGSSHRLSHVTMRASSPIFHWTHRSATTTNTINPNAIIQIPLVKAFNLHSGATVVRGPGFTGGDILRRTNTGTFADMRVNITGPLSQRYRVRIRYASTTDLQFFTRINGTTVNIGNFTRTMNSGDNLESGNFRTAGFSTPFSFSNAQSTFTLGTQPFSNQEVYIDRIEFVPAEVTFEAESDLERAQKAVNALFTSTNQLGLKTDVTDYQIDQVSNLVECLSDEFCLDEKRELSEKVKHAKRLSDKRNLLQDPNFTSINRQLDRGWRGSTDITIQGGNDVFKENYVTLPGTFDECYPTYLYQKIDESKLKAYTRYELRGYIEDSQDLEVYLIRYNAKHETVNVPGTGSLWPLSVESPIGRCGEPNRCVPHIEWNPDLDCSCRDGEKCAHHSHHFSLDIDVGCTDLNEDLGVWVIFKIKTQDGHARLGNLEFLEEKPLLGEALARVKRAEKKWRDKREQLQFETNIVYKEAKESVDALFVDSHYNRLQADTNITMIHAADKRVHRIREAYLPELSVIPGVNADIFEELEGLIFTAFSLYDARNIIKNGDFNNGLSCWNVKGHVDIQQNDHRSVLVVPEWESEVSQEVRVCPGRGYILRVTAYKEGYGEGCVTIHEIEDNTDELKFSNCIEEEVYPTDTGNDYTAHQGTTGCADACNSRNVGYEDGYEINTTASVNYKPTYEEEMYTDVRRDNHCEYDRGYGNHTPLPAGYVTKELEYFPETDTVWIEIGETEGTFIVDSVELLLMEE

SEQ ID NO: 214 - DNA, 3501 bp, Artificial Sequence
  Cry1J variant coding sequence
atggagatcaacaatcagaagcagtgcatcccatacaactgtctgtctaaccccgaagaggtcctccttgatggtgagcgtatccttcccgacattgatccactggaggttagtctctcactcctccagttcttgctcaacaacttcgtgccaggaggtggcttcatctccggattggttgacaagatctggggcgcattgagaccctcagagtgggacctgttcctcgctcagatcgagcgcttgatcgaccagaggattgaggctaccgtcagagccaaggctatcactgagctggagggactgggtaggaactaccagatctatgccgaggctttcaaggagtgggactctgaccctgacaacgaggctgcaaagtctcgcgtgatcgacaggttccgtatcctcgatgggcttatcgaggccaacatcccttccttccgtatcatcgagttcgaggtcccactgctgtccgtctatgtccaagcagccaacttgcacctcgcattgctcagggactctgtgatctttggcgaaaggtggggattgactaccaagaacgtgaacgacatctacaaccgccagatccgcgagatccacgagtactccaaccactgcgtcgacacctacaacaccgagctggagagactcggctttcgctcaatcgctcagtggcgcatctacaaccagttccgtagggagctgactctcaccgtcttggacatcgtcgcactgtttcccaactacgactctaggctgtaccctatccagaccttctcccagcttactagggagatcgtgaccagtccagtctcagagttctactacggtgtcatcaactccgggaacatcatcggtaccctcactgagcagcagatccgcagacctcacttgatggacttcttcaactccatgatcatgtacacctccgacaaccgtaaggagcactactggagtggactggagatgactgcctactttaccggattcgcaggtgcacaagtgtccttcccactggtcggtacacgtggagaatccgcacctccacttactgtcaggtctgtcaacgacggcatctaccgtatcctctcagctcccttctactcagcacccttccttggaaccatcgtccttggatcacgcggtgagaagttcgacttcgcactgaacaacatctcccctccaccttccaccatctacagacaccctggaactgtggactcacttgtctctatcccacctcaggacaactccgttccacctcacagaggatcttcccaccgtctgagtcacgtgactatgagagcctccagtcccatctttcactggacccacagatctgctaccaccaccaacaccatcaaccccaacgccatcatccagatacccttggtcaaggccttcaacctgcactctggagctacagttgttcgcggaccaggcttcactggtggagacatcttgaggcgtaccaacaccgggacattcgcagacatgcgtgtgaacatcaccggaccactgtctcagaggtatagggtgaggattcgctatgccagtaccactgacctccagttcttcaccaggatcaacggtaccaccgtcaacatcggcaacttcaccaggaccatgaactctggagacaacctggaatccgggaacttccgtactgcagggttctccactcccttcagcttctccaacgcacagtcaaccttcactctgggtacacaggctttctccaaccaggaggtgtacatcgataggatcgagtttgtgccagctgaggtgaccttcgaagccgagtctgaccttgagcgtgctcagaaagccgtgaacgcactgttcacttccaccaaccagctcggtctgaagaccgatgtgactgactaccagatcgaccaggtctcaaacctggttgagtgccttagtgacgagttctgcttggacgagaagcgtgagctgtctgagaaggtcaagcacgctaaacgcctgtccgacaagcgcaatctcctgcaagaccccaacttcacctccatcaaccgtcaactcgatcgtggttggcgtggatcaactgacatcaccatccaaggtgggaacgacgtcttcaaggagaactacgttaccttgccaggtaccttcgacgagtgctaccctacctacctgtaccagatcatcgacgagtctaagctgaaggcctacactcgctatgaactgagagggtacatcgaggactcccaggacctcgaagtctacctgatccgctacaacgccaagcacgagaccgtcaatgttcctgggacaggatctctgtggcctctgtccgttgagagtcctataggcagatgtggtgagcctaaccgatgcgttcctcacattgagtggaaccctgacctggactgttcatgtcgtgacggagagaagtgtgctcaccactcacaccacttctccttggacattgacgtcggatgcactgacctcaatgaggacttgggagtctgggtgatcttcaagatcaagacccaggacggtcacgctaggttgggtaacctcgaattcctggaggagaagccattgctcggtgaagcattggctcgcgtcaaacgcgctgagaagaagtggcgtgacaaacgtgagcagctccagttcgagaccaacatcgtctacaaggaggctaaggagtcagtggatgccctcttcgtggactcccactacaatcgtctgcaagccgacaccaacatcaccatgatccacgctgcagacaaacgtgtccacaggatcagggaagcttacttgccagagttgtccgtgataccaggtgtgaatgctgacatcttcgaggagctggaaggactgatcttcacagccttcagtctctacgacgctcgcaacatcatcaagaacggcgacttcaacaacggtctctcctgctggaacgtcaagggtcacgtggacattcagcagaacgaccacagatctgttctggtcgtgcctgaatgggagtccgaggtctcacaggaagtgcgtgtttgcccaggtagagggtacattctcagggtgactgcttacaaggagggctatggcgaaggatgcgtgaccatacacgagatcgaggacaacaccgacgagctgaagttctccaactgcatcgaggaggaggtttaccctactgacactggcaacgactacactgctcaccagggtactactggatgtgcagacgcttgcaactcccgtaacgtcggctacgaggacggttacgagatcaacaccactgccagtgtcaactacaagcctacctacgaggaggagatgtacaccgatgtgaggagggacaaccactgcgagtacgacagagggtatggtaaccacacaccactgcctgctgggtatgtgaccaaggagctggagtacttccctgaaaccgacactgtgtggatagagatcggtgagactgaaggcaccttcatcgtggattccgtcgagctgctccttatggaggag

SEQ ID NO: 215 - protein, 1167 aa, Artificial Sequence
  Cry1J variant
MEINNQKQCIPYNCLSNPEEVLLDGERILPDIDPLEVSLSLLQFLLNNFVPGGGFISGLVDKIWGALRPSEWDLFLAQIERLIDQRIEATVRAKAITELEGLGRNYQIYAEAFKEWESDPDNEAAKSRVIDRFRILDGLIEANIPSFRIIEFEVPLLSVYVQAANLHLALLRDSVIFGERWGLTTKNVNDIYNRQIREIHEYSNHCVDTYNTELERLGFRSIAQWRIYNQFRRELTLTVLDIVALFPNYDSRLYPIQTFSQLTREIVTSPVSEFYYGVINSGNIIGTLTEQQIRRPHLMDFFNSMIMYTSDNRREHYWSGLEMTAYFTGFAGAQVSFPLVGTRGESAPPLTVRSVNDGIYRILSAPFYSAPFLGTIVLGSRGEKFDFALNNISPPPSTIYRHPGTVDSLVSIPPQDNSVPPHRGSSHRLSHVTMRASSPIFHWTHRSATTTNTINPNAIIQIPLVKAFNLHSGATVVRGPGFTGGDILRRTNTGTFADMRVNITGPLSQRYRVRIRYASTTDLQFFTRINGTTVNIGNFTRTMNSGDNLESGNFRTAGFSTPFSFSNAQSTFTLGTQVFSNQEVYIDRIEFVPAEVTFEAESDLERAQKAVNALFTSTNQLGLKTDVTDYQIDQVSNLVECLSDEFCLDEKRELSEKVKHAKRLSDKRNLLQDPNFTSINRQLDRGWRGSTDITIQGGNDVFKENYVTLPGTFDECYPTYLYQKIDESKLKAYTRYELRGYIEDSQDLEVYLIRYNAKHETVNVPGTGSLWPLSVESPIGRCGEPNRCVPHIEWNPDLDCSCRDGEKCAHHSHHFSLDIDVGCTDLNEDLGVWVIFKIKTQDGHARLGNLEFLEEKPLLGEALARVKRAEKKWRDKREQLQFETNIVYKEAKESVDALFVDSHYNRLQADTNITMIHAADKRVHRIREAYLPELSVIPGVNADIFEELEGLIFTAFSLYDARNIIKNGDFNNGLSCWNVKGHVDIQQNDHRSVLVVPEWESEVSQEVRVCPGRGYILRVTAYKEGYGEGCVTIHEIEDNTDELKFSNCIEEEVYPTDTGNDYTAHQGTTGCADACNSRNVGYEDGYEINTTASVNYKPTYEEEMYTDVRRDNHCEYDRGYGNHTPLPAGYVTKELEYFPETDTVWIEIGETEGTFIVDSVELLLMEE

SEQ ID NO: 216 - DNA, 3501 bp, Artificial Sequence
  soybean optimized coding sequence
atggagatcaacaatcagaagcaatgcatcccatacaactgcctgtctaacccagaggaggtccttctcgacggagaacgtatactcccagacattgacccactggaagtctccttgtcactgctccagttcctgctcaacaacttcgtgccaggtggaggtttcatctccggactcgttgacaagatctggggagctctgagacccagtgagtgggacctctttcttgctcagatcgagaggctcatcgatcagaggattgaggctacagtcagagccaaggccatcacagagttggaaggccttggcaggaactaccagatctatgcagaagccttcaaggactgggaatctgatcctgacaacgaggctgcaaagtctcgtgtcatcgacaggtttaggatactggatggcttgatcgaggctaacatcccatccttccgtatcattgagttcgaggtgcccttgctctcagtctatgtgcaagctgccaaccttcacttggcattgctcagagactccgtgatctttggcgaacgttggggccttaccaccaagaacgtcaacgacatctacaaccgtcagattcgcgagattcacgagtattccaaccactgcgtggacacctacaacaccgagttggaacgcctgggattcaggagtatcgcacagtggaggatctacaaccagttccgtcgcgaacttactctcactgtcctcgatatcgtcgcactctttcccaactacgactcacgtctgtaccctatccagaccttctcccaactgactcgagagatcgtcacttcaccagtctccgagttctactatggagtgatcaactcaggcaacatcatcggcactctcacagagcagcagatccgtagacctcacctgatggacttcttcaactccatgatcatgtacacctctgacaaccgtcgtgagcactactggagtggactggagatgacagcctacttcactggattcgcaggtgcacaggtcagtttcccactggtcggaaccagaggtgaatctgcaccacctctgactgtcaggtcagtcaacgacggtatctatcgcattctcagtgctcccttctactcagcaccattcctcggtaccatagtcctgggtagtagaggtgagaagttcgacttcgccctcaacaacatctcacctcctccctcaaccatctaccgacaccctggaactgttgattccttggtcagtatcccacctcaggacaattccgttccaccacatcgtggctcatcacacaggctctctcacgttaccatgagggcatctagtccaatcttccactggactcacaggtcagctactaccaccaacaccatcaaccctaacgctatcattcagatccctttggtgaaagccttcaatctgcactctggtgccacagttgttagaggacctggcttcacaggtggagacatactccgtaggaccaacactggaaccttcgctgacatgcgtgtcaacatcactggtcccttgagtcagaggtacagagtccgcatacgttacgcctctaccactgatctgcagttcttcacacgcatcaacggtaccaccgtgaacattgggaactttacccgtaccatgaactcaggcgacaaccttgagtctggtaactttaggaccgcaggtttcagtacacccttctccttctccaatgcccagtcaacattcaccttgggtacacaacccttctccaaccaggaagtctacattgaccgtatcgagtttgtgccagtcgaggtcacattcgaggctgaaagtgaccttgagagagctcagaaggcagtcaacgctctgttcactagtaccaaccagcttggactgaagactgatgtgacagactatcagatcgaccaagtgtccaacctcgttgagtgcttgtcagacgagttctgcctggacgagaaacgcgagttgtccgagaaggtcaagcacgctaaacgcctctctgacaagcgcaatctgctccaagaccctaacttcacatccatcaaccgtcaactcgatcgtggatggagaggttccaccgacatcaccattcaaggaggcaacgacgtcttcaaggagaactacgtcacacttcccgggactttcgacgagtgctatccaacctacctctaccagatcatcgacgagtccaagctcaaagcctacactcgctacgaactccgtgggtacatcgaggatagtcaggacctggaggtgtatctgatccgttacaacgctaagcacgagactgtcaatgtcccaggaactggtagtctctggcccttgtccgttgagtctcctattggacgttgtggagaacccaatcgctgtgtccctcacatcgagtggaacccagacttggattgctcatgccgtgatggagagaagtgcgcacaccattcacaccacttctcactggacattgatgtcgggtgcactgatctcaacgaggatcttggagtctgggtgatcttcaagatcaagacccaggatggacacgcaaggttgggtaaccttgagttcctggaggagaagcctttgctgggagaagctttggcaagggtcaagcgtgccgagaagaagtggcgtgacaagcgtgaacagctccagttcgagaccaacatcgtctacaaggaggctaaggagtcagtggacgcactgttcgtggactctcactacaacaggttgcaagccgacaccaacatcaccatgattcacgcagctgacaagagggttcaccgcattagagaggcatacttgccagagctctcagtcatccctggtgtcaacgctgacatcttcgaagagctggagggactgatctttacagccttctccctgtacgatgctcgcaacatcatcaagaacggcgacttcaacaacggcttgtcctgctggaacgtgaaaggccacgttgatatccagcagaacgaccacagatccgtcctggttgtccctgaatgggaatccgaggttagtcaggaagttcgcgtgtgtcctggacgtggatacattctcagagtgaccgcttacaaggagggatacggtgaaggatgcgtgactatccacgagatcgaggacaacaccgacgagctcaagttctccaactgcattgaggaggaagtgtaccctactgacactgggaacgactacactgctcaccaaggcactactggatgtgctgatgcatgcaactctcgcaacgttgggtacgaggatggatacgagatcaacaccacagcctccgtcaactacaagcctacctacgaagaggagatgtacaccgacgttaggcgtgacaaccactgtgagtacgatcgtggatacggcaaccacactccattgccagctggttatgtcaccaaggagctcgagtacttcccagagaccgatactgtctggatcgagataggagagactgagggtaccttcatcgttgacagtgtcgaactcttgctgatggaggag

SEQ ID NO: 217 - protein, 1167 aa, Artificial Sequence
  Cry1J variant
MEINNQKQCIPYNCLSNPEEVLLDGERILPDIDPLEVSLSLLQFLLNNFVPGGGFISGLVDKIWGALRPSEWDLFLAQIERLIDQRIEATVRAKAITELEGLGRNYQIYAEAFKDWESDPDNEAAKSRVIDRFRILDGLIEANIPSFRIIEFEVPLLSVYVQAANLHLALLRDSVIFGERWGLTTKNVNDIYNRQIREIHEYSNHCVDTYNTELERLGFRSIAQWRIYNQFRRELTLTVLDIVALFPNYDSRLYPIQTFSQLTREIVTSPVSEFYYGVINSGNIIGTLTEQQIRRPHLMDFFNSMIMYTSDNRREHYWSGLEMTAYFTGFAGAQVSFPLVGTRGESAPPLTVRSVNDGIYRILSAPFYSAPFLGTIVLGSRGEKFDFALNNISPPPSTIYRHPGTVDSLVSIPPQDNSVPPHRGSSHRLSHVTMRASSPIFHWTHRSATTTNTINPNAIIQIPLVKAFNLHSGATVVRGPGFTGGDILRRTNTGTFADMRVNITGPLSQRYRVRIRYASTTDLQFFTRINGTTVNIGNFTRTMNSGDNLESGNFRTAGFSTPFSFSNAQSTFTLGTQPFSNQEVYIDRIEFVPVEVTFEAESDLERAQKAVNALFTSTNQLGLKTDVTDYQIDQVSNLVECLSDEFCLDEKRELSEKVKHAKRLSDKRNLLQDPNFTSINRQLDRGWRGSTDITIQGGNDVFKENYVTLPGTFDECYPTYLYQIIDESKLKAYTRYELRGYIEDSQDLEVYLIRYNAKHETVNVPGTGSLWPLSVESPIGRCGEPNRCVPHIEWNPDLDCSCRDGEKCAHHSHHFSLDIDVGCTDLNEDLGVWVIFKIKTQDGHARLGNLEFLEEKPLLGEALARVKRAEKKWRDKREQLQFETNIVYKEAKESVDALFVDSHYNRLQADTNITMIHAADKRVHRIREAYLPELSVIPGVNADIFEELEGLIFTAFSLYDARNIIKNGDFNNGLSCWNVKGHVDIQQNDHRSVLVVPEWESEVSQEVRVCPGRGYILRVTAYKEGYGEGCVTIHEIEDNTDELKFSNCIEEEVYPTDTGNDYTAHQGTTGCADACNSRNVGYEDGYEINTTASVNYKPTYEEEMYTDVRRDNHCEYDRGYGNHTPLPAGYVTKELEYFPETDTVWIEIGETEGTFIVDSVELLLMEE

SEQ ID NO: 218 - DNA, 3501 bp, Artificial Sequence
  soybean optimized coding sequence
atggagatcaacaatcagaagcaatgcatcccatacaactgcctgtctaacccagaggaggtccttctcgacggagaacgtatactcccagacattgacccactggaagtctccttgtcactgctccagttcctgctcaacaacttcgtgccaggtggaggtttcatctccggactcgttgacaagatctggggagctctgagacccagtgagtgggacctctttcttgctcagatcgagaggctcatcgatcagaggattgaggctacagtcagagccaaggccatcacagagttggaaggccttggcaggaactaccagatctatgcagaagccttcaaggactgggaatctgatcctgacaacgaggctgcaaagtctcgtgtcatcgacaggtttaggatactggatggcttgatcgaggctaacatcccatccttccgtatcattgagttcgaggtgcccttgctctcagtctatgtgcaagctgccaaccttcacttggcattgctcagagactccgtgatctttggcgaacgttggggccttaccaccaagaacgtcaacgacatctacaaccgtcagattcgcgagattcacgagtattccaaccactgcgtggacacctacaacaccgagttggaacgcctgggattcaggagtatcgcacagtggaggatctacaaccagttccgtcgcgaacttactctcactgtcctcgatatcgtcgcactctttcccaactacgactcacgtctgtaccctatccagaccttctcccaactgactcgagagatcgtcacttcaccagtctccgagttctactatggagtgatcaactcaggcaacatcatcggcactctcacagagcagcagatccgtagacctcacctgatggacttcttcaactccatgatcatgtacacctctgacaaccgtcgtgagcactactggagtggactggagatgacagcctacttcactggattcgcaggtgcacaggtcagtttcccactggtcggaaccagaggtgaatctgcaccacctctgactgtcaggtcagtcaacgacggtatctatcgcattctcagtgctcccttctactcagcaccattcctcggtaccatagtcctgggtagtagaggtgagaagttcgacttcgccctcaacaacatctcacctcctccctcaaccatctaccgacaccctggaactgttgattccttggtcagtatcccacctcaggacaattccgttccaccacatcgtggctcatcacacaggctctctcacgttaccatgagggcatctagtccaatcttccactggactcacaggtcagctactaccaccaacaccatcaaccctaacgctatcattcagatccctttggtgaaagccttcaatctgcactctggtgccacagttgttagaggacctggcttcacaggtggagacatactccgtaggaccaacactggaaccttcgctgacatgcgtgtcaacatcactggtcccttgagtcagaggtacagagtccgcatacgttacgcctctaccactgatctgcagttcttcacacgcatcaacggtaccaccgtgaacattgggaactttacccgtaccatgaactcaggcgacaaccttgagtctggtaactttaggaccgcaggtttcagtacacccttctccttctccaatgcccagtcaacattcaccttgggtacacaagtcttctccaaccaggaagtctacattgaccgtatcgagtttgtgccagtcgaggtcacattcgaggctgaaagtgaccttgagagagctcagaaggcagtcaacgctctgttcactagtaccaaccagcttggactgaagactgatgtgacagactatcagatcgaccaagtgtccaacctcgttgagtgcttgtcagacgagttctgcctggacgagaaacgcgagttgtccgagaaggtcaagcacgctaaacgcctctctgacaagcgcaatctgctccaagaccctaacttcacatccatcaaccgtcaactcgatcgtggatggagaggttccaccgacatcaccattcaaggaggcaacgacgtcttcaaggagaactacgtcacacttcccgggactttcgacgagtgctatccaacctacctctaccagatcatcgacgagtccaagctcaaagcctacactcgctacgaactccgtgggtacatcgaggatagtcaggacctggaggtgtatctgatccgttacaacgctaagcacgagactgtcaatgtcccaggaactggtagtctctggcccttgtccgttgagtctcctattggacgttgtggagaacccaatcgctgtgtccctcacatcgagtggaacccagacttggattgctcatgccgtgatggagagaagtgcgcacaccattcacaccacttctcactggacattgatgtcgggtgcactgatctcaacgaggatcttggagtctgggtgatcttcaagatcaagacccaggatggacacgcaaggttgggtaaccttgagttcctggaggagaagcctttgctgggagaagctttggcaagggtcaagcgtgccgagaagaagtggcgtgacaagcgtgaacagctccagttcgagaccaacatcgtctacaaggaggctaaggagtcagtggacgcactgttcgtggactctcactacaacaggttgcaagccgacaccaacatcaccatgattcacgcagctgacaagagggttcaccgcattagagaggcatacttgccagagctctcagtcatccctggtgtcaacgctgacatcttcgaagagctggagggactgatctttacagccttctccctgtacgatgctcgcaacatcatcaagaacggcgacttcaacaacggcttgtcctgctggaacgtgaaaggccacgttgatatccagcagaacgaccacagatccgtcctggttgtccctgaatgggaatccgaggttagtcaggaagttcgcgtgtgtcctggacgtggatacattctcagagtgaccgcttacaaggagggatacggtgaaggatgcgtgactatccacgagatcgaggacaacaccgacgagctcaagttctccaactgcattgaggaggaagtgtaccctactgacactgggaacgactacactgctcaccaaggcactactggatgtgctgatgcatgcaactctcgcaacgttgggtacgaggatggatacgagatcaacaccacagcctccgtcaactacaagcctacctacgaagaggagatgtacaccgacgttaggcgtgacaaccactgtgagtacgatcgtggatacggcaaccacactccattgccagctggttatgtcaccaaggagctcgagtacttcccagagaccgatactgtctggatcgagataggagagactgagggtaccttcatcgttgacagtgtcgaactcttgctgatggaggag

SEQ ID NO: 219 - protein, 1167 aa, Artificial Sequence
  Cry1J variant
MEINNQKQCIPYNCLSNPEEVLLDGERILPDIDPLEVSLSLLQFLLNNFVPGGGFISGLVDKIWGALRPSEWDLFLAQIERLIDQRIEATVRAKAITELEGLGRNYQIYAEAFKDWESDPDNEAAKSRVIDRFRILDGLIEANIPSFRIIEFEVPLLSVYVQAANLHLALLRDSVIFGERWGLTTKNVNDIYNRQIREIHEYSNHCVDTYNTELERLGFRSIAQWRIYNQFRRELTLTVLDIVALFPNYDSRLYPIQTFSQLTREIVTSPVSEFYYGVINSGNIIGTLTEQQIRRPHLMDFFNSMIMYTSDNRREHYWSGLEMTAYFTGFAGAQVSFPLVGTRGESAPPLTVRSVNDGIYRILSAPFYSAPFLGTIVLGSRGEKFDFALNNISPPPSTIYRHPGTVDSLVSIPPQDNSVPPHRGSSHRLSHVTMRASSPIFHWTHRSATTTNTINPNAIIQIPLVKAFNLHSGATVVRGPGFTGGDILRRTNTGTFADMRVNITGPLSQRYRVRIRYASTTDLQFFTRINGTTVNIGNFTRTMNSGDNLESGNFRTAGFSTPFSFSNAQSTFTLGTQVFSNQEVYIDRIEFVPVEVTFEAESDLERAQKAVNALFTSTNQLGLKTDVTDYQIDQVSNLVECLSDEFCLDEKRELSEKVKHAKRLSDKRNLLQDPNFTSINRQLDRGWRGSTDITIQGGNDVFKENYVTLPGTFDECYPTYLYQIIDESKLKAYTRYELRGYIEDSQDLEVYLIRYNAKHETVNVPGTGSLWPLSVESPIGRCGEPNRCVPHIEWNPDLDCSCRDGEKCAHHSHHFSLDIDVGCTDLNEDLGVWVIFKIKTQDGHARLGNLEFLEEKPLLGEALARVKRAEKKWRDKREQLQFETNIVYKEAKESVDALFVDSHYNRLQADTNITMIHAADKRVHRIREAYLPELSVIPGVNADIFEELEGLIFTAFSLYDARNIIKNGDFNNGLSCWNVKGHVDIQQNDHRSVLVVPEWESEVSQEVRVCPGRGYILRVTAYKEGYGEGCVTIHEIEDNTDELKFSNCIEEEVYPTDTGNDYTAHQGTTGCADACNSRNVGYEDGYEINTTASVNYKPTYEEEMYTDVRRDNHCEYDRGYGNHTPLPAGYVTKELEYFPETDTVWIEIGETEGTFIVDSVELLLMEE

SEQ ID NO: 220 - DNA, 3771 bp, Bacillus thuringiensis
ttgacttcaaataggaaaaatgagaatgaaattataaatgctttatcgattccaacggtatcgaatccttccacgcaaatgaatctatcaccagatgctcgtattgaagatagcttgtgtgtagccgaggtgaacaatattgatccatttgttagcgcatcaacagtccaaacgggtataaacatagctggtagaatattgggcgtattaggtgtgccgtttgctggacaactagctagtttttatagttttcttgttggtgaattatggcctagtggcagagatccatgggaaattttcctggaacatgtagaacaacttataagacaacaagtaacagaaaatactaggaatacggctattgctcgattagaaggtctaggaagaggctatagatcttaccagcaggctcttgaaacttggttagataaccgaaatgatgcaagatcaagaagcattattcttgagcgctatgttgctttagaacttgacattactactgctataccgcttttcagaatacgaaatcaagaggttccattattaatggtatatgctcaagctgcaaatttacacctattattattgagggacgcatccctttttggtagtgaatgggggacggcatcttccgatgttaaccaatattaccaagaacaaatcagatatacagaggaatattctaaccattgcgtacaatggtataatacggggctaaataacttaagagggacaaatgctgaaagttgggtacggtataatcaattccgcagagacctaacattaggggtattagatctagtggccctattcccaagttatgacactcgcacttatccaatcaatacgagtgctcagttaacaagagaagtttatacagacgcaattgggaccgtacatccgagtcaagcttttgcaagtacgacttggtttaataataatgcaccatcgttttctgccatagaagctgccgttatcaggcctccgcatctacttgattttccagaacaacttacaatttacagcacattaagtcgatggagtaacactcagtttatgaatatatgggcaggtcatagacttgaatcccgcccaatagcagggtcattaaatacctctacacaaggatctaccaatacttctattaatcctgtaacattacagtttacgtctcgagacatttataggactgaatcattggcagggctaaatatatttataactcaacctgttaatggggttccttgggttagatttaattggagaaatcccctgaattctcttagaggtagccttctctatacgatagggtatactggagttgggacgcaattacaagattcagaaactgaattacccccagaaacaacagaacgaccaaattatgaatcatatagtcatagattatctcatataggactcatttcatcatctcatgtgagagcattggtatattcttggacgcaccgtagtgcagatcgtacgaatacgattggaccaaatagaattactcaaattcctgcagtgaagggaagatttctttttaatggctctgtaatttcaggaccaggatttactggtggagacgtagttagattgaataggaataatggtaatattcaaaatagagggtatattgaagttccaattcaattcacgtcgacatctaccagatatcgagttcgagtacgttatgcttctgtaacctcgattgagctcaatgttaattggggcaattcatcaatttttacgaacacattaccagcaacagctgcatcattagataatctacaatcaggggattttggttatgttgaaatcaacaatgcttttacatccgcaacaggtaatatagtaggtgttagaaattttagtgcaaatgcagaggtaataatagacagatttgaatttatcccagttactgcaaccttcgaggcaaaatatgatttagaaagagcacaaaaggcggtgaatgctctgtttacttctacaaatccaagaagattgaagacagatgtgacagattatcatattgaccaagtgtccaatctggtggtatgtttatcagatgaattttgcttggatgagaagcgagaattatttgagaaagtgaaatatgcgaagcgactcagtgatgaaagaaacttactccaagatccaaacttcacattcatcaatgggcaaccaagttttgcatccatcgatggacaatcaaacttcacctctattaatgagctatctaatcatggatggtggggcagtgcgaatgttaccattcaggaagggaatgacgtatttaaagagaattacgtcacactaccgggtacttttaatgagtgttatccaaattatttatatcaaaaaataggagagtcagaattaaaggcttatacgcgctatcaattaagagggtatattgaagatagtcaagatctagagatttatttaattcgttacaatgcaaagcatgaaacattaaatgttccaggtaccgagtccctatggccgctttcagttgaaagcccaatcggaaggtgcggagaaccaaatcgatgcgcaccacattttggatggaatcctgatctagattgttcctgcagagatagagaaaaatgtgcgcatcattcccatcatttcactttggatattgatgttggatgcacagacttgcaagaggatctaggcgtgtgggttgtattcaagattaagacgcaggaaggttatgcaagattaggaaatctggaatttatcgaagagaaaccattaattggagaagcactgtctcgtgtgaagagagcggaaaaaaaatggagagacaaaagggaaaaactacaagtggaaacaaaacgagtatatatagacgcaaaagaagctgtggatgctttattcgtagattctcaatatgatagattacaagcagatacaaacatcggtatgattcatgcggcagatagacttgttcatcggatccacgaggcttatcttccagaactacctttcattccaggaataaatgtggtgatttttgaagaattagaaaaccgtatttctactgcattttccttatatgatgcgagaaatgtcattaaaaatggcgatttcaataatggattgacatgctggaacgtgaaagggcatgtagaggtacagcagctgaacaatcatcgttcggtccttgtcatcccggaatgggaagcagaagtttcacaaaaggtgcgcgtctgtccaggtcgtggctatattcttcgtgtcacagcgtacaaagagggatatggggaaggctgcgtaactattcatgaagtcgataataatacagaccaattgaagtttagcaactgtgagaaaggacaagtatatccaggtaatacgatagcatgtaatgattataataagaatcatggtgcgaatgcatgtagttctcgtaatcgtggatatgacgaattctatggaaacaccccagctgattattctgcaaatcaaaaagaatacgggggtgcgtacacttcccacaatcatgcatatggcgaatcttatgaaagtaattcgtccataccagctgattatgcgccggtttatgaagaagaagcgtatacacatggacgaagaggtaattcttgtgaatataacagagggtatacaccattaccagctggttatgtgacagcagagttagaatacttcccagaaacggatacagtatgggttgagattggagaaacggaaggaacatttatcgtggacaatgtggaattactccttatggaggaatag

SEQ ID NO: 221 - protein, 1256 aa, Bacillus thuringiensis
MTSNRKNENEIINALSIPTVSNPSTQMNLSPDARIEDSLCVAEVNNIDPFVSASTVQTGINIAGRILGVLGVPFAGQLASFYSFLVGELWPSGRDPWEIFLEHVEQLIRQQVTENTRNTAIARLEGLGRGYRSYQQALETWLDNRNDARSRSIILERYVALELDITTAIPLFRIRNQEVPLLMVYAQAANLHLLLLRDASLFGSEWGTASSDVNQYYQEQIRYTEEYSNHCVQWYNTGLNNLRGTNAESWVRYNQFRRDLTLGVLDLVALFPSYDTRTYPINTSAQLTREVYTDAIGTVHPSQAFASTTWFNNNAPSFSAIEAAVIRPPHLLDFPEQLTIYSTLSRWSNTQFMNIWAGHRLESRPIAGSLNTSTQGSTNTSINPVTLQFTSRDIYRTESLAGLNIFITQPVNGVPWVRFNWRNPLNSLRGSLLYTIGYTGVGTQLQDSETELPPETTERPNYESYSHRLSHIGLISSSHVRALVYSWTHRSADRTNTIGPNRITQIPAVKGRFLFNGSVISGPGFTGGDVVRLNRNNGNIQNRGYIEVPIQFTSTSTRYRVRVRYASVTSIELNVNWGNSSIFTNTLPATAASLDNLQSGDFGYVEINNAFTSATGNIVGVRNFSANAEVIIDRFEFIPVTATFEAKYDLERAQKAVNALFTSTNPRRLKTDVTDYHIDQVSNLVVCLSDEFCLDEKRELFEKVKYAKRLSDERNLLQDPNFTFINGQPSFASIDGQSNFTSINELSNHGWWGSANVTIQEGNDVFKENYVTLPGTFNECYPNYLYQKIGESELKAYTRYQLRGYIEDSQDLEIYLIRYNAKHETLNVPGTESLWPLSVESPIGRCGEPNRCAPHFGWNPDLDCSCRDREKCAHHSHHFTLDIDVGCTDLQEDLGVWVVFKIKTQEGYARLGNLEFIEEKPLIGEALSRVKRAEKKWRDKREKLQVETKRVYIDAKEAVDALFVDSQYDRLQADTNIGMIHAADRLVHRIHEAYLPELPFIPGINVVIFEELENRISTAFSLYDARNVIKNGDFNNGLTCWNVKGHVEVQQLNNHRSVLVIPEWEAEVSQKVRVCPGRGYILRVTAYKEGYGEGCVTIHEVDNNTDQLKFSNCEKGQVYPGNTIACNDYNKNHGANACSSRNRGYDEFYGNTPADYSANQKEYGGAYTSHNHAYGESYESNSSIPADYAPVYEEEAYTHGRRGNSCEYNRGYTPLPAGYVTAELEYFPETDTVWVEIGETEGTFIVDNVELLLMEE

SEQ ID NO: 222 - DNA, 3714 bp, Bacillus thuringiensis
ttgaattcaaataggaaaaatgagaacgaaattatagatgcttcatttattcccgcagtatccaatgagtctgttacaatctctaaagaatatgcacaaacaaatcaattacaaaacaatagcattgaggatggtttgtgtatagccgaaggggaatatattgatccatttgttagcgcatcaacagtccaaacggggattagtatcgctggtagaatattgggtgtattaggtgtgccgtttgccggacaattagctagtttttatagttttattgttggtgaattatggcctaaaggcagagaccaatgggaaatttttatggaacatgtagaacaacttgtaagacaacaaataacagcaaatgctaggaatacggcccttgctcgattacaaggtttaggagattcctttagagcctatcaacagtcacttgaagattggctagagaaccgtaatgatgcaagaacgagaagtgttctttatactcaatatatagccttagagcttgattttctaaatgcgatgccgcttttcgcaataagagagcaagaggttcccttattaatggtatacgctcaagctgcaaacttgcacctattattattgagagacgcctccctttatggtcgtgaatttgggcttacctcccaagaaattcaacgttattatgaacgccaagtagaaagaacgagggactattctgaccattgcgtgcaatggtataatacgggtctaaataacttaagagggacaaatgctgaaagttgggtgcggtataatcaattccgtagagacctaacattaggggtattagatctagtggcactattcccaagctatgacactcgcacttatccaataaatacgagtgctcagttaacaagggaagtttatacagacgcaattggagcaacaggggtaaatatggcaagtatgaattggtataataataatgcaccttcgttttccgctatagagactgcggttatccgaagcccgcatctacttgattttctagaacaacttaaaatttttagcgcttcatcacgatggagtaatactaggcatatgacttattggcgggggcacacgattcaatctcggccaataagaggggcattaattacctcgacacacggaaataccaatacttctattaaccctgtaacattccagttcccgtcccgagacgtttataggactgaatcatatgcaggagtgcttctatggggaatttaccttgaacctattcatggtgttcctactgttagatttaattttaggaaccctcagaatacttttgaaagaggtactgctaactatagtcaaccctatgagtcacctgggcttcaattaaaagattcagaaactgaattaccaccagaaacaacagaacgaccaaattatgaatcatatagtcatagattatctcacatagggatcattttacaaactaggttgaatgtaccggtatattcttggacgcatcgtagtgcagatcgtacaaatacaattggaccaaatagaattactcaaattcctgcagtgaagggaaaccttctttttaatggttctgtaatttcaggaccaggatttactggtggggacttagttagattaaataatagtggaaataatattcaaaatagaggctatcttgaggttccaattcaattcacatcgacatctaccagatatcgagttcgtgtacgttatgcttctgtaaccccgattcacctcagtgttaattggggtaattcaaacattttttccagcacagttccagctacagctgcgtcattagataatctacaatcaagggattttggttattttgaaagtaccaatgcatttacatctgtaacaggtaatgtagtaggtgtaagaaattttagtgaaaatgccagagtgataatagacagatttgaatttattccagttactgcaaccttcgaagcagaatacgatttagaaagggcgcaagaggcggtgaatgctctgtttactaatacgaatccaagaagattgaaaacagatgtgacagattatcatattgatcaagtatccaatttagtggcgtgtttatcggatgaattctgcttagatgaaaagagagaattacttgagaaagtgaaatatgcgaaacgactcagtgatgaaagaaacttactccaagatccaaacttcacatccatcaataagcaaccagacttcatatctactaatgagcaatcgaatttcacatctatccatgaacaatctgaacatggatggtggggaagtgagaacattacaatccaggaaggaaatgacgtatttaaagagaattacgtcacactaccaggtacttataatgagtgttatccgacgtatttatatcaaaaaataggagagtcggaattaaaagcttatactcgctaccaattaagaggttatattgaagatagtcaagatttagagatatatttgattcgttataatgcgaaacatgaaacattggatgttccaggtaccgagtccgtatggccgctttcagttgaaagcccaatcagaaggtgcggagaaccgaatcgatgcgcaccacattttgaatggaatcctgatctagattgttcctgcagagatggagaaaaatgtgcgcatcattcccatcatttctctttggatattgatgttggatgcatagacttgcatgagaacctaggcgtgtgggtggtattcaagattaagacgcaggaaggtcatgcaagactagggaacctggaatttattgaagagaaaccattattaggagaagcactgtctcgtgtgaagagagcagagaaaaaatggagagacaaacgtgaaaaactacaattggaaacaaaacgagtatatacagaggcaaaagaagctgtggatgctttatttgtagattctcaatatgatagattacaagcggatacaaacattggcatgattcatgcggcagataaacttgttcatcgaattcgagaggcgtatctttcagaattatctgttatcccaggtgtaaatgcggaaatttttgaagaattagaaggtcgcattatcactgcaatctccctatacgatgcgagaaatgtcgttaaaaatggtgattttaataatggattagcatgctggaatgtaaaagggcatgtagatgtacaacagagccatcaccgttctgtccttgttatcccagaatgggaagcagaagtgtcacaagcagttcgcgtctgtccggggcgtggctatatcctccgtgtcacagcgtacaaagagggatatggagagggttgtgtaacgatccatgaaatcgagaacaatacagacgaactaaaatttaaaaactgtgaagaagaggaagtgtatccaacggatacaggaacgtgtaatgattatactgcacaccaaggtacagcagcatgtaattcccgtaatgctggatatgaggatgcatatgaagttgatactacagcatctgttaattacaaaccgacttatgaagaagaaacgtatacagatgtacgaagagataatcattgtgaatatgacagagggtatgtgaattatccaccagtaccagctggttatatgacaaaagaattagaatacttcccagaaaccgataaggtatggattgagattggagaaacggaagggaagtttattgtagacagcgtggaattactccttatggaggaatag

SEQ ID NO: 223 - protein, 1237 aa, Bacillus thuringiensis
MNSNRKNENEIIDASFIPAVSNESVTISKEYAQTNQLQNNSIEDGLCIAEGEYIDPFVSASTVQTGISIAGRILGVLGVPFAGQLASFYSFIVGELWPKGRDQWEIFMEHVEQLVRQQITANARNTALARLQGLGDSFRAYQQSLEDWLENRNDARTRSVLYTQYIALELDFLNAMPLFAIREQEVPLLMVYAQAANLHLLLLRDASLYGREFGLTSQEIQRYYERQVERTRDYSDHCVQWYNTGLNNLRGTNAESWVRYNQFRRDLTLGVLDLVALFPSYDTRTYPINTSAQLTREVYTDAIGATGVNMASMNWYNNNAPSFSAIETAVIRSPHLLDFLEQLKIFSASSRWSNTRHMTYWRGHTIQSRPIRGALITSTHGNTNTSINPVTFQFPSRDVYRTESYAGVLLWGIYLEPIHGVPTVRFNFRNPQNTFERGTANYSQPYESPGLQLKDSETELPPETTERPNYESYSHRLSHIGIILQTRLNVPVYSWTHRSADRTNTIGPNRITQIPAVKGNLLFNGSVISGPGFTGGDLVRLNNSGNNIQNRGYLEVPIQFTSTSTRYRVRVRYASVTPIHLSVNWGNSNIFSSTVPATAASLDNLQSRDFGYFESTNAFTSVTGNVVGVRNFSENARVIIDRFEFIPVTATFEAEYDLERAQEAVNALFTNTNPRRLKTDVTDYHIDQVSNLVACLSDEFCLDEKRELLEKVKYAKRLSDERNLLQDPNFTSINKQPDFISTNEQSNFTSIHEQSEHGWWGSENITIQEGNDVFKENYVTLPGTYNECYPTYLYQKIGESELKAYTRYQLRGYIEDSQDLEIYLIRYNAKHETLDVPGTESVWPLSVESPIRRCGEPNRCAPHFEWNPDLDCSCRDGEKCAHHSHHFSLDIDVGCIDLHENLGVWVVFKIKTQEGHARLGNLEFIEEKPLLGEALSRVKRAEKKWRDKREKLQLETKRVYTEAKEAVDALFVDSQYDRLQADTNIGMIHAADKLVHRIREAYLSELSVIPGVNAEIFEELEGRIITAISLYDARNVVKNGDFNNGLACWNVKGHVDVQQSHHRSVLVIPEWEAEVSQAVRVCPGRGYILRVTAYKEGYGEGCVTIHEIENNTDELKFKNCEEEEVYPTDTGTCNDYTAHQGTAACNSRNAGYEDAYEVDTTASVNYKPTYEEETYTDVRRDNHCEYDRGYVNYPPVPAGYMTKELEYFPETDKVWIEIGETEGKFIVDSVELLLMEE

SEQ ID NO: 224 - protein, 650 aa, Bacillus thuringiensis
MTSNRKNENEIINAVSNHSAQMDLLPDARIEDSLCIAEGNNIDPFVSASTVQTGINIAGRILGVLGVPFAGQLASFYSFLVGELWPRGRDQWEIFLEHVEQLINQQITENARNTALARLQGLGDSFRAYQQSLEDWLENRDDARTRSVLYTQYIALELDFLNAMPLFAIRNQEVPLLMVYAQAANLHLLLLRDASLFGSEFGLTSQEIQRYYERQVERTRDYSDYCVEWYNTGLNSLRGTNAASWVRYNQFRRDLTLGVLDLVALFPSYDTRTYPINTSAQLTREVYTDAIGATGVNMASMNWYNNNAPSFSAIEAAAIRSPHLLDFLEQLTIFSASSRWSNTRHMTYWRGHTIQSRPIGGGLNTSTHGATNTSINPVTLRFASRDVYRTESYAGVLLWGIYLEPIHGVPTVRFNFTNPQNISDRGTANYSQPYESPGLQLKDSETELPPETTERPNYESYSHRLSHIGIILQSRVNVPVYSWTHRSADRTNTIGPNRITQIPMVKASELPQGTTVVRGPGFTGGDILRRTNTGGFGPIRVTVNGPLTQRYRIGFRYASTVDFDFFVSRGGTTVNNFRFLRTMNSGDELKYGNFVRRAFTTPFTFTQIQDIIRTSIQGLSGNGEVYIDKIEIIPVTATFEAEYDLERAQE

SEQ ID NO: 225 - protein, 655 aa, Bacillus thuringiensis
MTSNRKNENEIINALSIPTVSNPSTQMNLSPDARIEDSLCVAEVNNIDPFVSASTVQTGINIAGRILGVLGVPFAGQLASFYSFLVGELWPSGRDPWEIFLEHVEQLIRQQVTENTRNTAIARLEGLGRGYRSYQQALETWLDNRNDARSRSIILERYVALELDITTAIPLFRIRNEEVPLLMVYAQAANLHLLLLRDASLFGSEWGMASSDVNQYYQEQIRYTEEYSNHCVQWYNTGLNNLRGTNAESWLRYNQFRRDLTLGVLDLVALFPSYDTRTYPINTSAQLTREIYTDPIGRTNAPSGFASTNWFNNNAPSFSAIEAAIFRPPHLLDFPEQLTIYSASSRWSSTQHMNYWVGHRLNFRPIGGTLNTSTQGLTNNTSINPVTLQFTSRDVYRTESNAGTNILFTTPVNGVPWARFNFINPQNIYERGATTYSQPYQGVGIQLFDSETELPPETTERPNYESYSHRLSHIGLIIGNTLRAPVYSWTHRSADRTNTIGPNRITQIPLVKALNLHSGVTVVGGPGFTGGDILRRTNTGTFGDIRLNINVPLSQRYRVRIRYASTTDLQFFTRINGTTVNIGNFSRTMNRGDNLEYRSFRTAGFSTPFNFLNAQSTFTLGAQSFSNQEVYIDRVEFVPAEVTFEAEYDLERAQK

SEQ ID NO: 226 - protein, 655 aa, Bacillus thuringiensis; identical to SEQ ID NO: 225

SEQ ID NO: 227 - protein, 653 aa, Bacillus thuringiensis
MTSNRKNENEIINALSIPAVSNHSAQMNLSTDARIEDSLCIAEGNNIDPFVSASTVQTGINIAGRILGVLGVPFAGQIASFYSFLVGELWPRGRDPWEIFLEHVEQLIRQQVTENTRDTALARLQGLGNSFRAYQQSLEDWLENRDDARTRSVLYTQYIALELDFLNAMPLFAIRNQEVPLLMVYAQAANLHLLLLRDASLFGSEFGLTSQEIQRYYERQVEKTREYSDYCARWYNTGLNNLRGTNAESWLRYNQFRRDLTLGVLDLVALFPSYDTRVYPMNTSAQLTREIYTDPIGRTNAPSGFASTNWFNNNAPSFSAIEAAVIRPPHLLDFPEQLTIFSVLSRWSNTQYMNYWVGHRLESRTIRGSLSTSTHGNTNTSINPVTLQFTSRDVYRTESFAGINILLTTPVNGVPWARFNWRNPLNSLRGSLLYTIGYTGVGTQLFDSETELPPETTERPNYESYSHRLSNIRLISGNTLRAPVYSWTHRSADRTNTISSDSITQIPLVKSFNLNSGTSVVSGPGFTGGDIIRTNVNGSVLSMGLNFNNTSLQRYRVRVRYAASQTMVLRVTVGGSTTFDQGFPSTMSANESLTSQSFRFAEFPVGISASGSQTAGISISNNAGRQTFHFDKIEFIPITATFEAEYDLERAQE

SEQ ID NO: 228 - protein, 654 aa, Bacillus thuringiensis
MTSNRKNENEIINALSIPAVSNHSTQMDLSPDARIEDSLCIAEGNNINPLVSASTVQTGINIAGRILGVLGVPFAGQIASFYSFLVGELWPRGRDQWEIFLEHVEQLINQQITENARNTALARLQGLGDSFRAYQQSLEDWLENRDDARTRSVLYTQYIALELDFLNAMPLFAIRNQEVPLLMVYAQAANLHLLLLRDASLFGSEFGLTSQEIQRYYERQVEQTRDYSDYCVEWYNTGLNSLRGTNAASWVRYNQFRRDLTLGVLDLVALFPSYDTRTYPINTSAQLTREVYTDAIGATGVNMASMNWYNNNAPSFSAIETAVIRSPHLLDFLEQLTIFSTSSRWSATRHMTYWRGHTIQSRPIGGGLNTSTHGSTNTSINPVRLSFFSRDVYWTESYAGVLLWGIYLEPIHGVPTVRFNFRNPQNTFERGTANYSQPYESPGLQLKDSETELPPETTERPNYESYSHRLSHIGLISQSRVHVPVYSWTHRSADRTNTISSDSITQIPLVKSFNLNSGTSVVSGPGFTGGDIIRTNVNGSVLSMGLNFNNTSLQRYRVRVRYAASQTMVLRVTVGGSTTFDQGFPSTMSANESLTSQSFRFAEFPVGISASGSQTAGISISNNAGRQTFHFDKIEFIPITATFEAEYDLERAQE

SEQ ID NO: 229 - protein, 661 aa, Bacillus thuringiensis
MNSNRKNENEIIDASFIPAVSNESVTISKEYAQTNQLQNNSIEDGLCIAEGEYIDPFVSASTVQTGISIAGRILGVLGVPFAGQLASFYSFIVGELWPKGRDQWEIFMEHVEQLVRQQITANARNTALARLQGLGDSFRAYQQSLEDWLENRNDARTRSVLYTQYIALELDFLNAMPLFAIREQEVPLLMVYAQAANLHLLLLRDASLYGREFGLTSQEIQRYYERQVERTRDYSDHCVQWYNTGLNNLRGTNAESWVRYNQFRRDLTLGVLDLVALFPSYDTRTYPINTSAQLTREVYTDAIGATGVNMASMNWYNNNAPSFSAIETAVIRSPHLLDFLEQLKIFSASSRWSNTRHMTYWRGHTIQSRPIRGALITSTHGNTNTSINPVTFQFPSRDVYRTESYAGVLLWGIYLEPIHGVPTVRFNFRNPQNTFERGTANYSQPYESPGLQLKDSETELPPETTERPNYESYSHRLSHIGIILQTRLNVPVYSWTHRSADRTNTISSDSITQIPLVKSFNLNSGTSVVSGPGFTGGDIIRTNVNGSVLSMGLNFNNTSLQRYRVRVRYAASQTMVLRVTVGGSTTFDQGFPSTMSANESLTSQSFRFAEFPVGISASGSQTAGISISNNAGRQTFHFDKIEFIPITATFEAEYDLERAQE

SEQ ID NO: 230 - protein, 1164 aa, Bacillus thuringiensis
MDNNPNINECIPYNCLSNPEEVLLDGERISTGNSSIDISLSLVQFLVSNFVPGGGFLVGLIDFVWGIVGPSQWDAFLVQIEQLINERIAEFARNAAIANLEGLGNNFNIYVEAFKEWEEDPKNPATRTRVIDRFRILDGLLERDIPSFRISGFEVPLLSVYAQAANLHLAILRDSVIFGERWGLTTINVNENYNRLIRHIDEYADHCANTYNRGLNNLPKSTYQDWITYNRLRRDLTLTVLDIAAFFPNYDNRRYPIQPVGQLTREVYTDPLINFNPQLQSVAQLPTFNVMENSAIRNPHLFDILNNLTIFTDWFSVGRNFYWGGHRVISSLIGGGNITSPIYGREANQEPPRSFTFNGPVFRTLSNPTLRLLQQPWPAPPFNLRGVEGVEFSTPTNSFTYRGRGTVDSLTELPPEDNSVPPREGYSHRLCHATFVQRSGTPFLTTGVVFSWTHRSATLTNTIDPERINQIPLVKGFRVWGGTSVITGPGFTGGDILRRNTFGDFVSLQVNINSPITQRYRLRFRYASSRDARVIVLTGAASTGVGGQVSVNMPLQKTMEIGENLTSRTFRYTDFSNPFSFRANPDIIGISEQPLFGAGSISSGELYIDKIEIILADATLEAESDLERAQKAVNALFTSSNQIGLKTDVTDYHIDRVSNLVECLSDEFCLDEKKELSEKVKHAKRLSDERNLLQDPNFRGINRQLDRGWRGSTDITIQGGDDVFKENYVTLLGTFDECYPTYLYQKIDESKLKAYTRYQLRGYIEDSQDLEIYLIRYNAKHETVNVPGTGSLWPLSAPSPIGKCAHHSHHFSLDIDVGCTDLNEDLGVWVIFKIKTQDGHARLGNLEFLEEKPLVGEALARVKRAEKKWRDKREKLEWETNIVYKEAKESVDALFVNSQYDRLQADTNIAMIHAADKRVHSIREAYLPELSVIPGVNAAIFEELEGRIFTAFSLYDARNVIKNGDFNNGLSCWNVKGHVDVEEQNNHRSVLVVPEWEAEVSQEVRVCPGRGYILRVTAYKEGYGEGCVTIHEIENNTDELKFSNCVEEEVYPNNTVTCNDYTATQEEYEGTYTSRNRGYDGAYESNSSVPADYASAYEEKAYTDGRRDNPCESNRGYGDYTPLPAGYVTKELEYFPETDKVWIEIGETEGTFIVDSVELLLMEE

SEQ ID NO: 231 - protein, 605 aa, Bacillus thuringiensis
MAEGNNLNQCIPYNCLSNPKDIILGDERLETGNTVADITLGIVNLLFSEFVPGGGFILGLLDLIWGSIGRSQWDLFLEQIEQLIKQRIEEFARNQAISRLEGLSDLYKTYARAFSDWEADPTNPALREEMRIQFNDMNSAIITALPLFRVQNYEVALLSVYVQAANLHLSILRDVSVFGERWGYDTATINNRYSDLTSLIHVYTNHCVDTYNQGLRRLEGRFLTDWIVYNRFRRQLTISVLDIVAFFPNYDIRTYPIQTATQLTREVYLDLPFINENLSPAASYPTFSAAESAIIRSPHLVDFLNSFTIYTDSLARYAYWGGHLVNSFRTGTTTNLIRSPLYGREGNTERPVTITASPSVPIFRTLSYITGLDNSNPVAGIEGVEFQNTISRSIYRKSGPIDSFSELPPQDASVSPAIGYSHRLCHATFLERISGPRIAGTVFSWTHRSASPTNEVSPSRITQIPWVKAHTLASGASVIKGPGFTGGDILTRNSMGELGTLRVTFTGRLPQSYYIRFRYASVANRSGTFRYSQPPSYGISFPKTMDAGEPLTSRSFAHTTLFTPITFSRAQEEFDLYIQSGVYIDRIEFIPVTATFEAEYDLERA

SEQ ID NO: 232 - DNA, 2256 bp, Artificial Sequence
  variant of MP589FL
atggagggaaataatctaaatcaatgcataccttacaattgtttaagtaatcctaaggacataatattaggtgatgaaaggctagaaactggtaatactgtagcagacattaccttagggattgtcaatctattgttttctgagtttgttcctggtggaggctttatactaggattactggatttaatatgggggtctataggtcgttcccaatgggatctatttctggaacagattgaacaattgattaagcaaagaatagaagaatttgctaggaatcaggcaatttcaagattggaggggctaagcgatctttataagacctatgctagagcgtttagcgattgggaggcagatccgactaatccagcattaagggaagaaatgcgtatacaatttaatgacatgaatagtgctatcataacggctctcccactttttagagttcaaaattatgaagttgctcttttatctgtttatgttcaagctgcaaacttacatttatctattttaagagatgtttcagtctttggagaaagatggggatatgatacagcaactatcaataatcgctatagtgacttaactagccttattcatgtttatactaatcattgtgtggatacgtataatcagggattaaggcgtttggaaggtcgttttcttaccgattggattgtatataatcgtttccgaagacaattaacaatttcagtattagatattgttgcattttttccaaattatgatattcgaacatatccaattcaaacagctactcagctaacgagggaaatctatctggatttaccttttattaatgaaaatctttctcctgcagcaagctatccctcattctcagatgctgaaagtgctataatcaggagtcctcatttagtggactttttaaatagcttcactatttatacagatagtcttgctcgatatttatattggggagggcatcgggtgaattttacccgttcaggagttactacttttatacaatcaccactatatggaagggaaggaaatgcagagcgttctgtaattatttcggcatcatctagcgtaccaatatttagaacactttcatatgttactggccttgacaatgcaaatcctgtagctggaattgaaggagtggaattccaaaatactataagtagaagtatctatcgtaaaagtggtccaattgattcttttaatgaattaccacctcaagatgccagtgtatctccttcaattgggtatagtcaccgtttatgtcatgccacatttttagaacggattagtggaccaagaattgcaggtgtcgttttttcctggacacatcgtagtgctagccctactaatgaagtaagttcatctagaattacacaaattccatgggtaaaggcgcatactcttgcgtctggtgcctccgttattaaagggcctggatttacaggtggagatatactaactaggaataccttaggcgaactggggactttaagagtaacttttgcaggaagattatcacaaagttattatatacgtttccgttatgcttccgtagctaataggagtggtatatttagctattcacagccaacttcatatggaatttcctttccaaaaactatggatgcagatgaatcattaacatctcgttcatttgcacttgctacacttgctacaccgctaacctttagaaggcaagaagaattaaatctacaaataccatcaggtacttatatagatcgaattgagtttgttccagtcgatgaaacctttacaacagaatctgatctggatagagcacaacaggcggtgaatgcgctgtttacttcttccaatcaaatcggcttaaaaacagatgtgacggattatcatattgatcaagtatccaatttagtggattgtttatcggatgaattttgtctggatgaaaagcgagaattgtccgagaaagtcaaacatgcgaagcgactcagtgatgagcggaatttacttcaagatccaaactttagaggaatcaatagacaaccagaccgtggttggagaggaagtacagatattaccatccaaggaggagatgacgtattcaaagagaattacgttacactaccaggtacctttgatgagtgctatccaacgtatttatatcaaaaaatagatgagtcgaaattaaaagcctatacccgttaccaattaagagggtatatcgaagatagtcaagacttagaaatctatttaattcgctacaattga

SEQ ID NO: 233 - protein, 751 aa, Artificial Sequence
  variant of MP589FL aa
MEGNNLNQCIPYNCLSNPKDIILGDERLETGNTVADITLGIVNLLFSEFVPGGGFILGLLDLIWGSIGRSQWDLFLEQIEQLIKQRIEEFARNQAISRLEGLSDLYKTYARAFSDWEADPTNPALREEMRIQFNDMNSAIITALPLFRVQNYEVALLSVYVQAANLHLSILRDVSVFGERWGYDTATINNRYSDLTSLIHVYTNHCVDTYNQGLRRLEGRFLTDWIVYNRFRRQLTISVLDIVAFFPNYDIRTYPIQTATQLTREIYLDLPFINENLSPAASYPSFSDAESAIIRSPHLVDFLNSFTIYTDSLARYLYWGGHRVNFTRSGVTTFIQSPLYGREGNAERSVIISASSSVPIFRTLSYVTGLDNANPVAGIEGVEFQNTISRSIYRKSGPIDSFNELPPQDASVSPSIGYSHRLCHATFLERISGPRIAGVVFSWTHRSASPTNEVSSSRITQIPWVKAHTLASGASVIKGPGFTGGDILTRNTLGELGTLRVTFAGRLSQSYYIRFRYASVANRSGIFSYSQPTSYGISFPKTMDADESLTSRSFALATLATPLTFRRQEELNLQIPSGTYIDRIEFVPVDETFTTESDLDRAQQAVNALFTSSNQIGLKTDVTDYHIDQVSNLVDCLSDEFCLDEKRELSEKVKHAKRLSDERNLLQDPNFRGINRQPDRGWRGSTDITIQGGDDVFKENYVTLPGTFDECYPTYLYQKIDESKLKAYTRYQLRGYIEDSQDLEIYLIRYN

SEQ ID NO: 234 - DNA, 3492 bp, Bacillus thuringiensis
atggagggaaataatctaaatcaatgcataccttacaattgtttaagtaatcctaaggacataatattaggtgatgaaaggctagaaactggtaatactgtagcagacattaccttagggattgtcaatctattgttttctgagtttgttcctggtggaggctttatactaggattactggatttaatatgggggtctataggtcgttcccaatgggatctatttctggaacagattgaacaattgattaagcaaagaatagaagaatttgctaggaatcaggcaatttcaagattggaggggctaagcgatctttataagacctatgctagagcgtttagcgattgggaggcagatccgactaatccagcattaagggaagaaatgcgtatacaatttaatgacatgaatagtgctatcataacggctctcccactttttagagttcaaaattatgaagttgctcttttatctgtttatgttcaagctgcaaacttacatttatctattttaagagatgtttcagtctttggagaaagatggggatatgatacagcaactatcaataatcgctatagtgacttaactagccttattcatgtttatactaatcattgtgtggatacgtataatcagggattaaggcgtttggaaggtcgttttcttaccgattggattgtatataatcgtttccgaagacaattaacaatttcagtattagatattgttgcattttttccaaattatgatattcgaacatatccaattcaaacagctactcagctaacgagggaaatctatctggatttaccttttattaatgaaaatctttctcctgcagcaagctatccctcattctcagatgctgaaagtgctataatcaggagtcctcatttagtggactttttaaatagcttcactatttatacagatagtcttgctcgatatttatattggggagggcatcgggtgaattttacccgttcaggagttactacttttatacaatcaccactatatggaagggaaggaaatgcagagcgttctgtaattatttcggcatcatctagcgtaccaatatttagaacactttcatatgttactggccttgacaatgcaaatcctgtagctggaattgaaggagtggaattccaaaatactataagtagaagtatctatcgtaaaagtggtccaattgattcttttaatgaattaccacctcaagatgccagtgtatctccttcaattgggtatagtcaccgtttatgtcatgccacatttttagaacggattagtggaccaagaattgcaggtgtcgttttttcctggacacatcgtagtgctagccctactaatgaagtaagttcatctagaattacacaaattccatgggtaaaggcgcatactcttgcgtctggtgcctccgttattaaagggcctggatttacaggtggagatatactaactaggaataccttaggcgaactggggactttaagagtaacttttgcaggaagattatcacaaagttattatatacgtttccgttatgcttccgtagctaataggagtggtatatttagctattcacagccaacttcatatggaatttcctttccaaaaactatggatgcagatgaatcattaacatctcgttcatttgcacttgctacacttgctacaccgctaacctttagaaggcaagaagaattaaatctacaaataccatcaggtacttatatagatcgaattgagtttgttccagtcgatgaaacctttacaacagaatctgatctggatagagcacaacaggcggtgaatgcgctgtttacttcttccaatcaaatcggcttaaaaacagatgtgacggattatcatattgatcaagtatccaatttagtggattgtttatcggatgaattttgtctggatgaaaagcgagaattgtccgagaaagtcaaacatgcgaagcgactcagtgatgagcggaatttacttcaagatccaaactttagaggaatcaatagacaaccagaccgtggttggagaggaagtacagatattaccatccaaggaggagatgacgtattcaaagagaattacgttacactaccaggtacctttgatgagtgctatccaacgtatttatatcaaaaaatagatgagtcgaaattaaaagcctatacccgttatcaattaagagggtatatcggggatagtcaagacttagaaatctatttaattcgttacaatgcaaaacacgaaatagtaaatgtaccaggtacagggagtttatggactctttctgtagaaaattcaattggaccttgtggagaaccgaatcgatgcgcgccacaccttgaatggaatcctaatctagagtgttcttgcagagaaggggaaaaatgtgcccatcattcccatcatttctccttggacattgatgttggatgtacagacttaaatgaggacttaggtgtatgggcgatattcaagattaagacgcaagatggccatgcaagactaggaaatctagagtttctcgaagagaaaccactattaggggaagcactagctcgtgtgaaaagagcggagaagaaatggagagacaaacgcgaaaaattggaatgggaaacaaatattgtttataaagaggcaaaagaatctgtagatgctttatttgtgaactctcaatatgatagattacaagcggatacgaatatcgcgatgattcatgcggcagataaacgcgttcatagaattagagaagcataccttccagaattatctgtaattccgggtgtaaatgcgggcattttcgaagaattagagggacgcattttcacagcctactctctatatgatgcgagaaatgtcattaaaaatggcgatttcaataatggtttattgtgctggaacttgaaagggcatgtagatgtagaagaacaaaacaaccatcgttcagtccttgttgtcccggaatgggaagcagaggtgtcccaagaagttcgtgtctgtccaggtcgtggctatatccttcgtgttacagcgtacaaagagggatatggagagggctgcgtaaccatccatgagatcgaagacaatacagacgaactgaaattcagcaactgtgtagaagaggaagtatatccaaacaacacggtaacgtgtaatgattatactgcgactcaagaagaatatgagggtacgtacacttctcgtaatcgaggatatgacggagcctatgaaagcaattcttctgtaccagctgattatgcatcagcctatgaagaaaaagcgtatacagatggaagaagagagaatccttgtgaatctaatagaggatatggggattacgcgccactaccagctggttatgtgacaaaggaattagagtacttcccagaaaccgataaggtatggattgagatcggagaaacggaaggaacattcattgtggatagtgtggaattactccttatggaggaataa

SEQ ID NO: 235 - protein, 1163 aa, Bacillus thuringiensis
MEGNNLNQCIPYNCLSNPKDIILGDERLETGNTVADITLGIVNLLFSEFVPGGGFILGLLDLIWGSIGRSQWDLFLEQIEQLIKQRIEEFARNQAISRLEGLSDLYKTYARAFSDWEADPTNPALREEMRIQFNDMNSAIITALPLFRVQNYEVALLSVYVQAANLHLSILRDVSVFGERWGYDTATINNRYSDLTSLIHVYTNHCVDTYNQGLRRLEGRFLTDWIVYNRFRRQLTISVLDIVAFFPNYDIRTYPIQTATQLTREIYLDLPFINENLSPAASYPSFSDAESAIIRSPHLVDFLNSFTIYTDSLARYLYWGGHRVNFTRSGVTTFIQSPLYGREGNAERSVIISASSSVPIFRTLSYVTGLDNANPVAGIEGVEFQNTISRSIYRKSGPIDSFNELPPQDASVSPSIGYSHRLCHATFLERISGPRIAGVVFSWTHRSASPTNEVSSSRITQIPWVKAHTLASGASVIKGPGFTGGDILTRNTLGELGTLRVTFAGRLSQSYYIRFRYASVANRSGIFSYSQPTSYGISFPKTMDADESLTSRSFALATLATPLTFRRQEELNLQIPSGTYIDRIEFVPVDETFTTESDLDRAQQAVNALFTSSNQIGLKTDVTDYHIDQVSNLVDCLSDEFCLDEKRELSEKVKHAKRLSDERNLLQDPNFRGINRQPDRGWRGSTDITIQGGDDVFKENYVTLPGTFDECYPTYLYQKIDESKLKAYTRYQLRGYIGDSQDLEIYLIRYNAKHEIVNVPGTGSLWTLSVENSIGPCGEPNRCAPHLEWNPNLECSCREGEKCAHHSHHFSLDIDVGCTDLNEDLGVWAIFKIKTQDGHARLGNLEFLEEKPLLGEALARVKRAEKKWRDKREKLEWETNIVYKEAKESVDALFVNSQYDRLQADTNIAMIHAADKRVHRIREAYLPELSVIPGVNAGIFEELEGRIFTAYSLYDARNVIKNGDFNNGLLCWNLKGHVDVEEQNNHRSVLVVPEWEAEVSQEVRVCPGRGYILRVTAYKEGYGEGCVTIHEIEDNTDELKFSNCVEEEVYPNNTVTCNDYTATQEEYEGTYTSRNRGYDGAYESNSSVPADYASAYEEKAYTDGRRENPCESNRGYGDYAPLPAGYVTKELEYFPETDKVWIEIGETEGTFIVDSVELLLMEE

SEQ ID NO: 236 - DNA, 2259 bp, Artificial Sequence
  variant of MP589FL
atggaaggcaacaacctgaaccagtgcattccgtataactgcctgagcaacccgaaagatattattctgggcgatgaacgtctggaaaccggcaacaccgtggcggatattaccctgggcattgtgaacctgctgtttagcgaatttgtgccgggcggcggctttattctgggcctgctggatctgatttggggcagcattggccgtagccagtgggatctgtttctggaacagattgaacagctgattaaacagcgtattgaagaatttgcgcgtaaccaggcgattagccgtctggaaggcctgagcgatctgtataaaacctatgcgcgtgcgtttagcgattgggaagcggatccgaccaacccggcgctgcgtgaagaaatgcgtattcagtttaacgatatgaacagcgcgattattaccgcgctgccgctgtttcgtgtgcagaactatgaagtggcgctgctgagcgtgtatgtgcaggcggcgaacctgcatctgagcattctgcgtgatgtgagcgtgtttggcgaacgttggggctatgataccgcgaccattaacaaccgttatagcgatctgaccagcctgattcatgtgtataccaaccattgcgtggatacctataaccagggcctgcgtcgtctggaaggccgttttctgaccgattggattgtgtataaccgttttcgtcgtcagctgaccattagcgtgctggatattgtggcgttttttccgaactatgatattcgtacctatccgattcagaccgcgacccagctgacccgtgaagtgtatctggatctgccgtttattaacgaaaacctgagcccggcggcgagctatccgacctttagcgcggcggaaagcgcgattattcgtagcccgcatctggtggattttctgaacagctttaccatttataccgatagcctggcgcgttatgcgtattggggcggccatctggtgaacagctttcgtaccggcaccaccaccaacctgattcgtagcccgctgtatggccgtgaaggcaacaccgaacgtccggtgaccattaccgcgagcccgagcgtgccgatttttcgtaccctgagctatattaccggcctggataacagcaacccggtggcgggcattgaaggcgtggaatttcagaacaccattagccgtagcatttatcgtaaaagcggcccgattgatagctttagcgaactgccgccgcaggatgcgagcgtgagcccggcgattggctatagccatcgtctgtgccatgcgacctttctggaacgtattagcggcccgcgtattgcgggcaccgtgtttagctggacccatcgtagcgcgagcccgaccaacgaagtgagcccgagccgtattacccagattccgtgggtgaaagcgcataccctggcgagcggcgcgagcgtgattaaaggcccgggctttaccggcggcgatattctgacccgtaacagcatgggcgaactgggcaccctgcgtgtgacctttaccggccgtctgccgcagagctattatattcgttttcgttatgcgagcgtggcgaaccgtagcggcacctttcgttatagccagccgccgagctatggcattagctttccgaaaaccatggatgcgggcgaaccgctgaccagccgtagctttgcgcataccaccctgtttaccccgattacctttagccgtgcgcaggaagaatttgatctgtatattcagagcggcgtgtatattgatcgtattgaatttattccggtgaccgcgacctttgaagcggaatatgatctggaacgtgcgcagaaagtggtgaacgcgctgtttaccagcaccaaccagctgggcctgaaaaccgatgtgaccgattatcatattgatcaggtgagcaacctggtggcgtgcctgagcgatgaattttgcctggatgaaaaacgtgaactgagcgaaaaagtgaaacatgcgaaacgtctgagcgatgaacgtaacctgctgcaggatccgaactttcgtggcattaaccgtcagccggatcgtggctggcgtggcagcaccgatattaccattcagggcggcgatgatgtgtttaaagaaaactatgtgaccctgccgggcacctttgatgaatgctatccgacctatctgtatcagaaaattgatgaaagcaaactgaaagcgtatacccgttatcagctgcgtggctatattgaagatagccaggatctggaaatttatctgattcgttataac

SEQ ID NO: 237 - protein, 753 aa, Artificial Sequence
  variant of MP589FL
MEGNNLNQCIPYNCLSNPKDIILGDERLETGNTVADITLGIVNLLFSEFVPGGGFILGLLDLIWGSIGRSQWDLFLEQIEQLIKQRIEEFARNQAISRLEGLSDLYKTYARAFSDWEADPTNPALREEMRIQFNDMNSAIITALPLFRVQNYEVALLSVYVQAANLHLSILRDVSVFGERWGYDTATINNRYSDLTSLIHVYTNHCVDTYNQGLRRLEGRFLTDWIVYNRFRRQLTISVLDIVAFFPNYDIRTYPIQTATQLTREVYLDLPFINENLSPAASYPTFSAAESAIIRSPHLVDFLNSFTIYTDSLARYAYWGGHLVNSFRTGTTTNLIRSPLYGREGNTERPVTITASPSVPIFRTLSYITGLDNSNPVAGIEGVEFQNTISRSIYRKSGPIDSFSELPPQDASVSPAIGYSHRLCHATFLERISGPRIAGTVFSWTHRSASPTNEVSPSRITQIPWVKAHTLASGASVIKGPGFTGGDILTRNSMGELGTLRVTFTGRLPQSYYIRFRYASVANRSGTFRYSQPPSYGISFPKTMDAGEPLTSRSFAHTTLFTPITFSRAQEEFDLYIQSGVYIDRIEFIPVTATFEAEYDLERAQKVVNALFTSTNQLGLKTDVTDYHIDQVSNLVACLSDEFCLDEKRELSEKVKHAKRLSDERNLLQDPNFRGINRQPDRGWRGSTDITIQGGDDVFKENYVTLPGTFDECYPTYLYQKIDESKLKAYTRYQLRGYIEDSQDLEIYLIRYN

SEQ ID NO: 238 - DNA, 2259 bp, Artificial Sequence
  variant of MP589FL
atggaaggcaacaacctgaaccagtgcattccgtataactgcctgaccaacccgaaagatattattctgggcgatgaacgtctggaaaccggcaacaccgtggcggatattaccctgggcattgtgaacctgctgtttaccgaatttgtgccgggcggcggctttattctgggcctgctggatgtgatttggggcagcattggccgtagccagtgggaactgtttctggaacagattgaacagctgattaaacagcgtattgaagaatttgcgcgtaaccaggcgattagccgtctggaaggcctgagcgatctgtataaaacctatgcgcgtgcgtttagcgattgggaagcggatccgaccaacccggcgctgcgtgaagaaatgcgtattcagtttaacgatatgaacagcgcgattattaccgcgctgccgctgtttcgtgtgcagaactatgaagtggcgctgctgagcgtgtatgtgcaggcggcgaacctgcatctgagcattctgcgtgatgtgagcgtgtttggcgaacgttggggctatgataccgcgaccattaacaaccgttatagcgatctgaccagcctgattcatgtgtataccaaccattgcgtggatacctataaccagggcctgcgtcgtctggaaggccgttttctgaccgattggattgtgtataaccgttttcgtcgtcagctgaccattagcgtgctggatattgtggcgttttttccgaactatgatattcgtacctatccgattcagaccgcgacccagctgacccgtgaagtgtatctggatctgccgtttattaacgaaaacctgagcccggcggcgagctatccgacctttagcgcggcggaaagcgcgattattcgtagcccgcatctggtggattttctgaacagctttaccatttataccgatagcctggcgcgttatgcgtattggggcggccatctggtgaacagctttcgtaccggcaccaccaccaacctgattcgtagcccgctgtatggccgtgaaggcaacaccgaacgtccggtgaccattaccgcgagcccgagcgtgccgatttttcgtaccctgagctatattaccggcctggataacagcaacccggtggcgggcattgaaggcgtggaatttcagaacaccattagccgtagcatttatcgtaaaagcggcccgattgatagctttagcgaactgccgccgcaggatgcgagcgtgagcccggcgattggctatagccatcgtctgtgccatgcgacctttctggaacgtattagcggcccgcgtattgcgggcaccgtgtttagctggacccatcgtagcgcgagcccgaccaacgaagtgagcccgagccgtattacccagattccgtgggtgaaagcgcataccctggcgagcggcgcgagcgtgattaaaggcccgggctttaccggcggcgatattctgacccgtaacagcatgggcgaactgggcaccctgcgtgtgagctttaccggccgtctgccgcagagctattatattcgttttcgttatgcgagcgtggcgaaccgtaccggcacctttcgttatagccagccgccgagctatggcctgagctttccgaaaaccatggatgcgggcgaaccgctgaccagccgtagctttgcgcataccaccctgtttaccccgattacctttagccgtgcgcaggaagaatttgatctgtatattcagagcggcgtgtatattgatcgtattgaatttattccggtgaccgcgacctttgaagcggaatatgatctggaacgtgcgcagaaagtggtgaacgcgctgtttaccagcaccaaccagctgggcctgaaaaccgatgtgaccgattatcatattgatcaggtgagcaacctggtggcgtgcctgagcgatgaattttgcctggatgaaaaacgtgaactgagcgaaaaagtgaaacatgcgaaacgtctgagcgatgaacgtaacctgctgcaggatccgaactttcgtggcattaaccgtcagccggatcgtggctggcgtggcagcaccgatattaccattcagggcggcgatgatgtgtttaaagaaaactatgtgaccctgccgggcacctttgatgaatgctatccgacctatctgtatcagaaaattgatgaaagcaaactgaaagcgtatacccgttatcagctgcgtggctatattgaagatagccaggatctggaaatttatctgattcgttataac

SEQ ID NO: 239 - protein, 753 aa, Artificial Sequence
  variant of MP589FL
MEGNNLNQCIPYNCLTNPKDIILGDERLETGNTVADITLGIVNLLFTEFVPGGGFILGLLDVIWGSIGRSQWELFLEQIEQLIKQRIEEFARNQAISRLEGLSDLYKTYARAFSDWEADPTNPALREEMRIQFNDMNSAIITALPLFRVQNYEVALLSVYVQAANLHLSILRDVSVFGERWGYDTATINNRYSDLTSLIHVYTNHCVDTYNQGLRRLEGRFLTDWIVYNRFRRQLTISVLDIVAFFPNYDIRTYPIQTATQLTREVYLDLPFINENLSPAASYPTFSAAESAIIRSPHLVDFLNSFTIYTDSLARYAYWGGHLVNSFRTGTTTNLIRSPLYGREGNTERPVTITASPSVPIFRTLSYITGLDNSNPVAGIEGVEFQNTISRSIYRKSGPIDSFSELPPQDASVSPAIGYSHRLCHATFLERISGPRIAGTVFSWTHRSASPTNEVSPSRITQIPWVKAHTLASGASVIKGPGFTGGDILTRNSMGELGTLRVSFTGRLPQSYYIRFRYASVANRTGTFRYSQPPSYGLSFPKTMDAGEPLTSRSFAHTTLFTPITFSRAQEEFDLYIQSGVYIDRIEFIPVTATFEAEYDLERAQKVVNALFTSTNQLGLKTDVTDYHIDQVSNLVACLSDEFCLDEKRELSEKVKHAKRLSDERNLLQDPNFRGINRQPDRGWRGSTDITIQGGDDVFKENYVTLPGTFDECYPTYLYQKIDESKLKAYTRYQLRGYIEDSQDLEIYLIRYN

SEQ ID NO: 240 - DNA, 2259 bp, Artificial Sequence
  variant of MP589FL
atggaaggcaacaacctgaaccagtgcattccgtataactgcctgaccaacccgaaagatattattctgggcgatgaacgtctggaaaccggcaacaccgtggcggatattaccctgggcattgtgaacctgctgtttaccgaatttgtgccgggcggcggctttattctgggcctgctggatgtgatttggggcagcattggccgtagccagtgggaactgtttctggaacagattgaacagctgattaaacagcgtattgatgattttgcgcgtaaccaggcgattagccgtctggaaggcctgagcgatctgtataaaacctatgcgcgtgcgtttagcgattgggaagcggatccgaccaacccggcgctgcgtgaagaaatgcgtattcagtttaacgatatgaacagcgcgattattaccgcgctgccgctgtttcgtgtgcagaactatgaagtggcgctgctgagcgtgtatgtgcaggcggcgaacctgcatctgagcattctgcgtgatgtgagcgtgtttggcgaacgttggggctatgataccgcgaccattaacaaccgttatagcgatctgaccagcctgattcatgtgtataccaaccattgcgtggatacctataaccagggcctgcgtcgtctggaaggccgttttctgaccgattggattgtgtataaccgttttcgtcgtcagctgaccattagcgtgctggatattgtggcgttttttccgaactatgatattcgtacctatccgattcagaccgcgacccagctgacccgtgaagtgtatctggatctgccgtttattaacgaaaacctgagcccggcggcgagctatccgacctttagcgcggcggaaagcgcgattattcgtagcccgcatctggtggattttattaacagctttaccatttataccgatagcctggcgcgttatgcgtattggggcggccatctggtgaacagctttcgtaccggcaccaccaccaacctgattcgtagcccgctgtatggccgtgaaggcaacaccgaacgtccggtgaccattaccgcgagcccgagcgtgccgatttttcgtaccctgagctatattaccggcctggataacagcaacccggtggcgggcattgaaggcgtggaatttcagaacaccattagccgtagcatttatcgtaaaagcggcccgattgatagctttagcgaactgccgccgcaggatgcgagcgtgagcccggcgattggctatagccatcgtctgtgccatgcgacctttctggaacgtattagcggcccgcgtattgcgggcaccgtgtttagctggacccatcgtagcgcgagcccgaccaacgaagtgagcccgagccgtattacccagattccgtgggtgaaagcgcataccctggcgagcggcgcgagcgtgattaaaggcccgggctttaccggcggcgatattctgacccgtaacagcatgggcgaactgggcaccctgcgtgtgagctttaccggccgtctgccgcagagctattatattcgttttcgttatgcgagcgtggcgaaccgtaccggcacctttcgttatagccagccgccgagctatggcctgagctttccgaaaaccatggatgcgggcgaaccgctgaccagccgtagctttgcgcataccaccctgtttaccccgattacctttagccgtgcgcaggaagaatttgatctgtatattcagagcggcgtgtatattgatcgtattgaatttattccggtgaccgcgacctttgaagcggaatatgatctggaacgtgcgcagaaagtggtgaacgcgctgtttaccagcaccaaccagctgggcctgaaaaccgatgtgaccgattatcatattgatcaggtgagcaacctggtggcgtgcctgagcgatgaattttgcctggatgaaaaacgtgaactgagcgaaaaagtgaaacatgcgaaacgtctgagcgatgaacgtaacctgctgcaggatccgaactttcgtggcattaaccgtcagccggatcgtggctggcgtggcagcaccgatattaccattcagggcggcgatgatgtgtttaaagaaaactatgtgaccctgccgggcacctttgatgaatgctatccgacctatctgtatcagaaaattgatgaaagcaaactgaaagcgtatacccgttatcagctgcgtggctatattgaagatagccaggatctggaaatttatctgattcgttataac

SEQ ID NO: 241 - protein, 753 aa, Artificial Sequence
  variant of MP589FL
MEGNNLNQCIPYNCLTNPKDIILGDERLETGNTVADITLGIVNLLFTEFVPGGGFILGLLDVIWGSIGRSQWELFLEQIEQLIKQRIDDFARNQAISRLEGLSDLYKTYARAFSDWEADPTNPALREEMRIQFNDMNSAIITALPLFRVQNYEVALLSVYVQAANLHLSILRDVSVFGERWGYDTATINNRYSDLTSLIHVYTNHCVDTYNQGLRRLEGRFLTDWIVYNRFRRQLTISVLDIVAFFPNYDIRTYPIQTATQLTREVYLDLPFINENLSPAASYPTFSAAESAIIRSPHLVDFINSFTIYTDSLARYAYWGGHLVNSFRTGTTTNLIRSPLYGREGNTERPVTITASPSVPIFRTLSYITGLDNSNPVAGIEGVEFQNTISRSIYRKSGPIDSFSELPPQDASVSPAIGYSHRLCHATFLERISGPRIAGTVFSWTHRSASPTNEVSPSRITQIPWVKAHTLASGASVIKGPGFTGGDILTRNSMGELGTLRVSFTGRLPQSYYIRFRYASVANRTGTFRYSQPPSYGLSFPKTMDAGEPLTSRSFAHTTLFTPITFSRAQEEFDLYIQSGVYIDRIEFIPVTATFEAEYDLERAQKVVNALFTSTNQLGLKTDVTDYHIDQVSNLVACLSDEFCLDEKRELSEKVKHAKRLSDERNLLQDPNFRGINRQPDRGWRGSTDITIQGGDDVFKENYVTLPGTFDECYPTYLYQKIDESKLKAYTRYQLRGYIEDSQDLEIYLIRYN

SEQ ID NO: 242 - DNA, 498 bp, Polystichum munitum
atggccgacaacgcaaaagaagaggtggaggatatgatggaccagactgaggcggtggggacgcacctggacgtttttgccgggctgaaggtgcaaccgcgcagtatcatcaccgtagaggtggatggcgccgccgtaatccaacagatcagagagatcttcacaagcctggcagctcacttcaactctacgagggtggtacgggatgaagccatcaagggcattcgagaccacttcagggccgccatcccgactcgcaacgtggtggtcattcacactcaacacgttcgcacactggtggacgtggagcacagccacctcgtcctgcagaccggcctctttaaaaaggtccccgtcgacatctacgtcttcaagtccggcgtcttcactaacctcggagacggaggctttatcaactgggcatggggtggcttcgtgagcgaggtcaatgggaagcgtatccacttcgtcttgccccccggggcgctcccgcctaat

SEQ ID NO: 243 - DNA, 498 bp, Polystichum aculeatum
atggccgacaaagcaaaagaagaggtggaggatacgatggacgagactgaggcggtggggacgcacctggacttctttagcgggttgaaggtgcaaccccgcaaggtcatcaccgtagaggtggatgccgccgccgtaatccaacagatcagagagatcttcacaagcatggcagctcacttcaactctacgagggtggtacgggatgaagccatcaagggcattcgagaccacttcagggccgccatcccgactcgcaacgtggtggtcattcacactcaacacgttcacacactggtggacttggagcacagccacctcgtcttgcagaccggcatctttaaaaaggtccccgtcgacatctacgtcttcaagtccggcgtgttcactaacctcggagacggaggctttatcaactgggcatggggtggcttcgtgagcgaggtcaatgggaagcgtatccacttcgtcttgccccccggggcgctcccgcctaat

SEQ ID NO: 244 - DNA, 498 bp, Polystichum aculeatum
atggccgacaaagcaaaagaagaggtggaggatacgatggacgagactgaggcggtggggacgcacctggacttctttagcgggttgaaggtgcaaccccgcaaggtcatcaccgtagaggcggatgccgccgccgtaatccaacagatcagagagatcttcacaagcatggcagctcacttcaactctacgagggtggtacgggatgaagccatcaagggcattcgagaccacttcagggccgccatcccgactcgcaacgtggtggtcattcacactcaacacgttcacacactggtggacttggagcacagccacctcgtcttgcagaccggcatctttaaaaaggtccccgtcgacatctacgtcttcaagtccggcgtgttcactaacctcggagacggaggctttatcaactgggcatggggtggcttcgtgagcgaggtcaatgggaagcgtatccacttcgtcttgccccccggggcgctcccgcctaat

SEQ ID NO: 245 - DNA, 510 bp, Osmunda claytoniana
atggccgagcatcatgatgtcagccaggccgaactgcagcgcgaggaggaggaagctctcaagccgtcgctcgacgaaactgaggaagtgggcgtgcagctctcgggtatcaacccacgcaatatcatcaccatcgaggtcgacgctgccgctgtcatccagcagataagggagaccttcagatatcttgcgagtatttacaactccactagggtgcaacgggatgcagcgatcaaggccatccgagaccacttcctggtggccatccccactcgcaatgtggtcgtaatccacacccagcatgtgcagactctggtcgacgcggagcacacatctatgaagttgaagacgggaatcttcacctcaaccacagtcgaagtctatgtcttcaagtctggcgtcttgaccaatctgggagacggcggcttcatcaactgggcctgggggggctacaccagctccgtcgttggcaaacgagttgtcttcgtgaacccgccgggggcgcttccc

SEQ ID NO: 246 - DNA, 513 bp, Osmunda cinnamomea
atggcggaacatcatggtgtcagccaggccgaactggagcgcgaggaggaggaagctgctctcaagccgacgctcaatgaaactgaggaagtgggagtgcagctctcgaatatcgacccacgcaggatcatcaccgtcgaggtcgaccctgccgctgtcatccagcagataagggaaaccttcagtgatcttgcgagaatttacaactccactagggtgcaacgggatgcagcgatcaaggccatccgagaccacttcctggtggccatccccactcgcaatgttgtggtgatccacacccagcacgtgcgtactctggtagccgaggagcacacatctttgaggttgaagacgggaatctttaccacaaccacagtgcaaatctatgtcttcaagtctggcgtcttcactaatctgggagacggcggctacatcaactgggcctgggggggctacattaactccgtcaatggcaaacaaatcaatttcaggaacccgccgggggcgcttccc

SEQ ID NO: 247 - DNA, 513 bp, Osmunda cinnamomea
atggcggaacatcatgatgtcagccaggccgaactggagcgcgaggaggaggaagctgctctcaagccgacgctcaatgaaactgaggaagtgggagtgcagctctcgaatatcgacccacgcaggatcatcaccgtcgaggtcgaccctgccgctgtcatccagcagataagggaaaccttcagtgatcttgcgagaatttacaactccactagggtgcaacgggatgcagcgatcaaggccatccgagaccacttcctggtggccatccccactcgcaatgttgtggtgatccacacccagcacgtgcgtactctggtagccgaggagcacacatctttgaggttgaagacgggaatctttaccacaaccacagtgcaaatctatgtcttcaagtctggcgtcttcaccaatctgggagacggcggctacatcaactgggcctgggggggctacattaactccgtcaatggcaaacaaatcaatttcaggaacccgccgggggcgcttccc

SEQ ID NO: 248 - DNA, 522 bp, Asplenium ebenoides
atggccgacaaagcagcagcaccaccaccttctcagctggctcatgagggagaagaagaggcggaggctttgatggacgagacagaggcggtgggaactcacctggacactgtactgaaggtggacgcccgcaatatcatcaccgtggaggtggacgccgccgccgtaattcagcagatcagagagatcttccgaaccatggcatcgcacttcaactctacgagagtggtgcgggatgaagccatcaagggcattcgcgaccacttcagggccgccgtccccactcgcaacgtggtggtcatccacactcaacacgtccacacgctggtggccgtggagcacagccatatggtcttgcagacgggcatcttcaagaaagtccccgtcgacatctacgtcttcaagtctggcgtgctcaccaacctcggcgacggaggctttatcaattgggcatggggtggctacgtcaccgaggttgtgggcaagcgcgttcacttccgcctacccccccgggcgctccct

SEQ ID NO: 249 - DNA, 522 bp, Asplenium ebenoides
atggccgacaaagcagcagcaccaccaccttctcagctggctcatgagggagaagaagaggcggaggctttgatggacgagacagaggcggtgggaactcacctggacactgtactgaaggtggacgcccgcaatatcatcaccgtggaggtggacgccgccgccgtaattcagcagatcagagagatcttccgaaccatggcatcgcacttcaactctacgagagtggtgcgggatgaagccatcaagggcattcgcgaccacttcagggccgccgtccccactcgcaacgtggtggtcatccacactcaacacgtccacacgctggtggccgtggagcacagccatatggtcttgcagacgggcatcttcaagaaagtccccgtcgacatctacgtcttcaagtctggcgtcctcaccaacctcggcgacggaggctttatcaattgggcatggggtggctacgtcaccgaggttgtgggcaagcgcgttcacttccgcctaccccccggggcgctccct

SEQ ID NO: 250 - DNA, 522 bp, Gymnocarpium dryopteris
atggccgacaaagtagcagcagcgcctcctcctactagagaagcagaagaagaggtggaggagacgatggacgagactgaggcggtggggacgcacctggacttgatagcgcccctgagtgtgcaaccccgcggcatcatcaccgtggaggtggaccccgccgccgtaatcgaacagatcagagagatcttccaaaccctggcacgtcatttcaactctacgagggtggtacgggatgaagccatcaagggcattcgagaccacttcagggccgccatcccgactcgcaacgtggtggtcattcacactcaacacgttcacacactggtgggcttggagcatagccacctcgtcttgcagaccggcatattcaaaaaggtccccgttgacatctacgtcttcaagtccggcgtgctcacgaacctcggagacggaggcttcatcaactgggcatggggtggcttcgtgaccgaggtcgttgggaagcgtgtccacttccgcttgccccccggggcgcttcct

SEQ ID NO: 251 - DNA, 510 bp, Colysis pteropus
atggcggacaaagtagcagcgggtcgacaagctgaagaagaggtggagacgacgatggacgagactgaggcggtggggacgcacctggacttgttggcggacgtgaaggtacaaccccggaacatcattaccgtggaggtggacgccgctgccgtaatccagcagatcagagagatcttccaaaccatggcacgtcacttcaactctacgagggtggtgcgggatgaagccatcaagggcattcgagaccacttcttggccgccgtcccgacccgcaacgtggtggtcgttcacactcagcacgttcacaccttggtgggcctggagcactcccacatggtcttgcagaccggcgtcttcaaaaaggtccccgtcgacatctacgtcttcaagtccggcgtctttaccctcctcggagacggaggcttcatcaactgggcatggggcggctacgtagaccaggtcgccggtaagcgtatccacttccgcttgccccccggcgcgctccct

SEQ ID NO: 252 - protein, 166 aa, Polystichum munitum
MADNAKEEVEDMMDQTEAVGTHLDVFAGLKVQPRSIITVEVDGAAVIQQIREIFTSLAAHFNSTRVVRDEAIKGIRDHFRAAIPTRNVVVIHTQHVRTLVDVEHSHLVLQTGLFKKVPVDIYVFKSGVFTNLGDGGFINWAWGGFVSEVNGKRIHFVLPPGALPPN

SEQ ID NO: 253 - protein, 166 aa, Polystichum aculeatum
MADKAKEEVEDTMDETEAVGTHLDFFSGLKVQPRKVITVEVDAAAVIQQIREIFTSMAAHFNSTRVVRDEAIKGIRDHFRAAIPTRNVVVIHTQHVHTLVDLEHSHLVLQTGIFKKVPVDIYVFKSGVFTNLGDGGFINWAWGGFVSEVNGKRIHFVLPPGALPPN

SEQ ID NO: 254 - protein, 166 aa, Polystichum aculeatum
MADKAKEEVEDTMDETEAVGTHLDFFSGLKVQPRKVITVEADAAAVIQQIREIFTSMAAHFNSTRVVRDEAIKGIRDHFRAAIPTRNVVVIHTQHVHTLVDLEHSHLVLQTGIFKKVPVDIYVFKSGVFTNLGDGGFINWAWGGFVSEVNGKRIHFVLPPGALPPN

SEQ ID NO: 255 - protein, 170 aa, Osmunda claytoniana
MAEHHDVSQAELQREEEEALKPSLDETEEVGVQLSGINPRNIITIEVDAAAVIQQIRETFRYLASIYNSTRVQRDAAIKAIRDHFLVAIPTRNVVVIHTQHVQTLVDAEHTSMKLKTGIFTSTTVEVYVFKSGVLTNLGDGGFINWAWGGYTSSVVGKRVVFVNPPGALP

SEQ ID NO: 256 - protein, 171 aa, Osmunda cinnamomea
MAEHHGVSQAELEREEEEAALKPTLNETEEVGVQLSNIDPRRIITVEVDPAAVIQQIRETFSDLARIYNSTRVQRDAAIKAIRDHFLVAIPTRNVVVIHTQHVRTLVAEEHTSLRLKTGIFTTTTVQIYVFKSGVFTNLGDGGYINWAWGGYINSVNGKQINFRNPPGALP

SEQ ID NO: 257 - protein, 171 aa, Osmunda cinnamomea
MAEHHDVSQAELEREEEEAALKPTLNETEEVGVQLSNIDPRRIITVEVDPAAVIQQIRETFSDLARIYNSTRVQRDAAIKAIRDHFLVAIPTRNVVVIHTQHVRTLVAEEHTSLRLKTGIFTTTTVQIYVFKSGVFTNLGDGGYINWAWGGYINSVNGKQINFRNPPGALP

SEQ ID NO: 258 - protein, 174 aa, Asplenium ebenoides
MADKAAAPPPSQLAHEGEEEAEALMDETEAVGTHLDTVLKVDARNIITVEVDAAAVIQQIREIFRTMASHFNSTRVVRDEAIKGIRDHFRAAVPTRNVVVIHTQHVHTLVAVEHSHMVLQTGIFKKVPVDIYVFKSGVLTNLGDGGFINWAWGGYVTEVVGKRVHFRLPPRALP

SEQ ID NO: 259 - protein, 174 aa, Asplenium ebenoides
MADKAAAPPPSQLAHEGEEEAEALMDETEAVGTHLDTVLKVDARNIITVEVDAAAVIQQIREIFRTMASHFNSTRVVRDEAIKGIRDHFRAAVPTRNVVVIHTQHVHTLVAVEHSHMVLQTGIFKKVPVDIYVFKSGVLTNLGDGGFINWAWGGYVTEVVGKRVHFRLPPGALP

SEQ ID NO: 260 - protein, 174 aa, Gymnocarpium dryopteris
MADKVAAAPPPTREAEEEVEETMDETEAVGTHLDLIAPLSVQPRGIITVEVDPAAVIEQIREIFQTLARHFNSTRVVRDEAIKGIRDHFRAAIPTRNVVVIHTQHVHTLVGLEHSHLVLQTGIFKKVPVDIYVFKSGVLTNLGDGGFINWAWGGFVTEVVGKRVHFRLPPGALP

SEQ ID NO: 261 - protein, 170 aa, Colysis pteropus
MADKVAAGRQAEEEVETTMDETEAVGTHLDLLADVKVQPRNIITVEVDAAAVIQQIREIFQTMARHFNSTRVVRDEAIKGIRDHFLAAVPTRNVVVVHTQHVHTLVGLEHSHMVLQTGVFKKVPVDIYVFKSGVFTLLGDGGFINWAWGGYVDQVAGKRIHFRLPPGALP

That which is claimed is:

1. A DNA construct comprising:
a) a polynucleotide encoding an IPD103 polypeptide having insecticidal activity; and
b) one or more polynucleotide selected from:
i) a polynucleotide encoding a PtlP-83 polypeptide having insecticidal activity;
ii) a polynucleotide encoding a Cry1B polypeptide having insecticidal activity;
iii) a polynucleotide encoding a variant Cry1B polypeptide having insecticidal activity;
iv) a polynucleotide encoding a Cry1C polypeptide having insecticidal activity;
v) a polynucleotide encoding a Cry1D polypeptide having insecticidal activity and
vi) a polynucleotide encoding a Cry1J polypeptide having insecticidal activity.

2. The DNA construct of claim 1, wherein the polynucleotides encoding the polypeptides are operably linked to heterologous regulatory elements.

3. The DNA construct of claim 1, wherein:
a) the IPD103 polypeptide comprises an amino acid sequence having at least 95% identity to the amino acid sequence of SEQ ID NO: 2;
b) the PtlP-83 polypeptide comprises an amino acid sequence having at least 95% identity to the amino acid sequence of SEQ ID NO: 45;
c) the Cry1B polypeptide comprises an amino acid sequence having at least 95% identity to the amino acid sequence of SEQ ID NO: 109;
d) the variant Cry1B polypeptide comprises an amino acid sequence having at least 95% identity to the amino acid sequence of SEQ ID NO: 91;
e) the Cry1C polypeptide comprises an amino acid sequence having at least 95% identity to the amino acid sequence of the Cry1Ca polypeptide of SEQ ID NO: 230;
f) the Cry1D polypeptide comprises an amino acid sequence having at least 95% identity to the amino acid sequence of the Cry1D polypeptide of SEQ ID NO: 231, SEQ ID NO: 233, SEQ ID NO: 235, SEQ ID NO: 237, SEQ ID NO: 239 or SEQ ID NO: 241; and
g) the Cry1J polypeptide comprises an amino acid sequence having at least 95% identity to the amino acid sequence of SEQ ID NO: 213.

4. The DNA construct of claim 1, wherein the DNA construct comprises a molecular stack selected from:
i) a molecular stack comprising:
a) a polynucleotide encoding the IPD103 polypeptide of SEQ ID NO: 2;
b) a polynucleotide encoding the variant Cry1B polypeptide of SEQ ID NO: 91; and
c) a polynucleotide encoding the PtlP-83 polypeptide of SEQ ID NO: 45;
ii) a molecular stack comprising:
a) a polynucleotide encoding the IPD103 polypeptide of SEQ ID NO: 2;
b) a polynucleotide encoding the Cry1Ca polypeptide; and
c) a polynucleotide encoding the PtlP-83 polypeptide of SEQ ID NO: 45;
iii) a molecular stack comprising:
a) a polynucleotide encoding the IPD103 polypeptide of SEQ ID NO: 2;
b) a polynucleotide encoding the Cry1D polypeptide; and
c) a polynucleotide encoding the PtlP-83 polypeptide of SEQ ID NO: 45;
iv) a molecular stack comprising:
a) a polynucleotide encoding the IPD103 polypeptide of SEQ ID NO: 2;
b) a polynucleotide encoding the Cry1Ca polypeptide; and
c) a polynucleotide encoding the Cry1D polypeptide;
v) a molecular stack comprising:
a) a polynucleotide encoding the IPD103 polypeptide of SEQ ID NO: 2;
b) a polynucleotide encoding the variant Cry1B polypeptide of SEQ ID NO: 91; and
c) a polynucleotide encoding the Cry1D polypeptide;
vi) a molecular stack comprising:
a) a polynucleotide encoding the IPD103 polypeptide of SEQ ID NO: 2;
b) a polynucleotide encoding the Cry1D polypeptide; and
c) a polynucleotide encoding the PtlP-83 polypeptide of SEQ ID NO: 45; and
vii) a molecular stack comprising:
a) a polynucleotide encoding the IPD103 polypeptide of SEQ ID NO: 2; and
b) a polynucleotide encoding the PtlP-83 polypeptide of SEQ ID NO: 45.

5. A transgenic plant comprising a molecular stack comprising:
a) a polynucleotide encoding an IPD103 polypeptide having insecticidal activity; and
b) one or more polynucleotides selected from:
i) a polynucleotide encoding a PtlP-83 polypeptide having insecticidal activity;
ii) a polynucleotide encoding a Cry1B polypeptide having insecticidal activity;
iii) a polynucleotide encoding a variant Cry1B polypeptide having insecticidal activity;
iv) a polynucleotide encoding a Cry1C polypeptide having insecticidal activity;
v) a polynucleotide encoding a Cry1D polypeptide having insecticidal activity; and
vi) a polynucleotide encoding a Cry1J polypeptide having insecticidal activity.

6. The transgenic plant of claim 5, wherein the polynucleotide encoding the polypeptides are each operably linked to heterologous regulatory elements.

7. The transgenic plant of claim 5, wherein:
a) the IPD103 polypeptide comprises an amino acid sequence having at least 95% identity to the amino acid sequence of SEQ ID NO: 2;
b) the PtlP-83 polypeptide comprises an amino acid sequence having at least 95% identity to the amino acid sequence of SEQ ID NO: 45;
c) the Cry1B polypeptide comprises an amino acid sequence having at least 95% identity to the amino acid sequence of SEQ ID NO: 109;
d) the variant Cry1B polypeptide comprises an amino acid sequence having at least 95% identity to the amino acid sequence of SEQ ID NO: 91;
e) the Cry1C polypeptide comprises an amino acid sequence having at least 95% identity to a Cry1Ca polypeptide of SEQ ID NO: 230;
f) the Cry1D polypeptide comprises an amino acid sequence having at least 95% identity to a Cry1D polypeptide of SEQ ID NO: 231, SEQ ID NO: 233, SEQ ID NO: 235, SEQ ID NO: 237, SEQ ID NO: 239 or SEQ ID NO: 241; and
g) the Cry1J polypeptide comprises an amino acid sequence having at least 95% identity to the amino acid sequence of SEQ ID NO: 213.

8. The transgenic plant of claim 5, wherein the molecular stack is selected from:
i) a molecular stack comprising:
a) a polynucleotide encoding the IPD103 polypeptide of SEQ ID NO: 2;
b) a polynucleotide encoding the variant Cry1B polypeptide of SEQ ID NO: 91; and
c) a polynucleotide encoding the PtlP-83 polypeptide of SEQ ID NO: 45;
ii) a molecular stack comprising:
a) a polynucleotide encoding the IPD103 polypeptide of SEQ ID NO: 2;
b) a polynucleotide encoding the Cry1Ca polypeptide; and
c) a polynucleotide encoding the PtlP-83 polypeptide of SEQ ID NO: 45;
iii) a molecular stack comprising:
a) a polynucleotide encoding the IPD103 polypeptide of SEQ ID NO: 2;
b) a polynucleotide encoding the Cry1D polypeptide; and
c) a polynucleotide encoding the PtlP-83 polypeptide of SEQ ID NO: 45;
iv) a molecular stack comprising:
a) a polynucleotide encoding the IPD103 polypeptide of SEQ ID NO: 2;
b) a polynucleotide encoding the Cry1Ca polypeptide; and
c) a polynucleotide encoding the Cry1D polypeptide;
v) a molecular stack comprising:
a) a polynucleotide encoding the IPD103 polypeptide of SEQ ID NO: 2;
b) a polynucleotide encoding the variant Cry1B polypeptide of SEQ ID NO: 91; and
c) a polynucleotide encoding the Cry1D polypeptide;
vi) a molecular stack comprising:
a) a polynucleotide encoding the IPD103 polypeptide of SEQ ID NO: 2;
b) a polynucleotide encoding the Cry1D polypeptide; and
c) a polynucleotide encoding the PtlP-83 polypeptide of SEQ ID NO: 45; and
vii) a molecular stack comprising:
a) a polynucleotide encoding the IPD103 polypeptide of SEQ ID NO: 2; and
b) a polynucleotide encoding the PtlP-83 polypeptide of SEQ ID NO: 45.

9. A transgenic plant comprising a breeding stack comprising;
a) a polynucleotide encoding an IPD103 polypeptide having insecticidal activity; and
b) one or more of polynucleotide selected from:
i. a polynucleotide encoding a PtlP-83 polypeptide having insecticidal activity;
ii. a polynucleotide encoding a Cry1B polypeptide having insecticidal activity;
iii. a polynucleotide encoding a variant Cry1B polypeptide having insecticidal activity;
iv. a polynucleotide encoding a Cry1C polypeptide having insecticidal activity;
v. a polynucleotide encoding a Cry1D polypeptide having insecticidal activity; and
vi. a polynucleotide encoding a Cry1J polypeptide having insecticidal activity.

10. The transgenic plant of claim 9, wherein the polynucleotides encoding the polypeptides are operably linked to heterologous regulatory elements.

11. The transgenic plant of claim 9, wherein:
a) the IPD103 polypeptide comprises an amino acid sequence having at least 95% identity to the amino acid sequence of SEQ ID NO: 2;
b) the PtlP-83 polypeptide comprises an amino acid sequence having at least 95% identity to the amino acid sequence of SEQ ID NO: 45;
c) the Cry1B polypeptide comprises an amino acid sequence having at least 95% identity to the amino acid sequence of SEQ ID NO: 109;
d) the variant Cry1B polypeptide comprises an amino acid sequence having at least 95% identity to the amino acid sequence of SEQ ID NO: 91;
e) the Cry1C polypeptide comprises an amino acid sequence having at least 95% identity to the amino acid sequence of a Cry1Ca polypeptide;
f) the Cry1D polypeptide comprises an amino acid sequence having at least 95% identity to the amino acid sequence of a Cry1Ca polypeptide; and
g) the Cry1J polypeptide comprises an amino acid sequence having at least 95% identity to the amino acid sequence of SEQ ID NO: 213.

12. The transgenic plant of claim 11, wherein the breeding stack comprises:
i) a breeding stack comprising:
a) a polynucleotide encoding the IPD103 polypeptide of SEQ ID NO: 2;
b) a polynucleotide encoding the variant Cry1B polypeptide of SEQ ID NO: 91; and
c) a polynucleotide encoding the PtlP-83 polypeptide of SEQ ID NO: 45;
ii) a breeding stack comprising:
a) a polynucleotide encoding the IPD103 polypeptide of SEQ ID NO: 2;
b) a polynucleotide encoding the Cry1Ca polypeptide; and
c) a polynucleotide encoding the PtlP-83 polypeptide of SEQ ID NO: 45;
iii) a breeding stack comprising:
a) a polynucleotide encoding the IPD103 polypeptide of SEQ ID NO: 2;
b) a polynucleotide encoding the Cry1D polypeptide; and
c) a polynucleotide encoding the PtlP-83 polypeptide of SEQ ID NO: 45;
iv) a breeding stack comprising:
a) a polynucleotide encoding the IPD103 polypeptide of SEQ ID NO: 2;
b) a polynucleotide encoding the Cry1Ca polypeptide; and
c) a polynucleotide encoding the Cry1D polypeptide;
v) a breeding stack comprising:
a) a polynucleotide encoding the IPD103 polypeptide of SEQ ID NO: 2;
b) a polynucleotide encoding the variant Cry1B polypeptide of SEQ ID NO: 91; and
c) a polynucleotide encoding the Cry1D polypeptide;
vi) a breeding stack comprising:
a) a polynucleotide encoding the IPD103 polypeptide of SEQ ID NO: 2;
b) a polynucleotide encoding the Cry1D polypeptide; and
c) a polynucleotide encoding the PtlP-83 polypeptide of SEQ ID NO: 45; and
vii) a breeding stack comprising: and
a) a polynucleotide encoding the IPD103 polypeptide of SEQ ID NO: 2; and
b) a polynucleotide encoding the PtlP-83 polypeptide of SEQ ID NO: 45.

13. A transgenic plant or progeny thereof comprising the DNA construct of claim 1, wherein said transgenic plant is corn or soy.

14. A transgenic plant or progeny thereof comprising the molecular stack of claim 5, wherein said transgenic plant is corn or soy.

15. A transgenic plant or progeny thereof comprising the breeding stack of claim 9, wherein said transgenic plant is corn or soy.

16. A method for controlling an insect pest population comprising contacting the insect pest population with the transgenic plant of claim 5.

17. A method for controlling an insect pest population comprising expressing, in the transgenic plant of claim 5, said polypeptides.

18. A method for controlling an insect pest population comprising contacting the insect pest population with the transgenic plant of claim 9.

19. A method for controlling an insect pest population comprising expressing, in the transgenic plant of claim 9, said polypeptides.

20. An insecticidal polypeptide having at least 95% sequence identity to the amino acid sequence of SEQ ID NO: 252, SEQ ID NO: 253, SEQ ID NO: 254, SEQ ID NO: 255, SEQ ID NO: 256, SEQ ID NO: 257, SEQ ID NO: 258, SEQ ID NO: 259, SEQ ID NO: 260 or SEQ ID NO: 261.

21. The insecticidal polypeptide of claim 20, wherein the insecticidal polypeptide is selected from amino acid sequence of SEQ ID NO: 252, SEQ ID NO: 253, SEQ ID NO: 254, SEQ ID NO: 255, SEQ ID NO: 256, SEQ ID NO: 257, SEQ ID NO: 258, SEQ ID NO: 259, SEQ ID NO: 260 or SEQ ID NO: 261.

22. The insecticidal polypeptide of claim 20, wherein the insecticidal polypeptide is operably linked to a heterologous signal peptide or transit peptide.

23. A polynucleotide encoding the polypeptide of claim 20.

24. The polynucleotide of claim 23, wherein the polynucleotide is operably linked to a heterologous regulatory element.

25. A DNA construct comprising the polynucleotide of claim 24.

26. A transgenic plant comprising the DNA construct of claim 25.

27. A method for controlling an insect pest population comprising contacting the insect pest population with the transgenic plant of claim 26.

28. A method for controlling an insect pest population comprising expressing, in the transgenic plant of claim 26, said polypeptide.

29. The DNA construct of claim 1, wherein the IPD103 polypeptide is the insecticidal polypeptide of claim 20.
